United States Patent Application Publication US 2019/0144922 A1 - sequence listing, part 13

SEQ ID NO: 5 - DNA, 4063606 bp, Proteus mirabilis (residues 2,031,804-4,063,606 of 4,063,606)
caatcctaagcgaatgcctgtacctaatgctttggctgcggcttcttttaccgcaaatcgtttagctaaaaaacgaacaggttgtttatgtgattgatatataatccattcattatcagtaagaatacgtcgcgcgaggcgttctcctgaacgccctattatctcttcaatacgtgatatctcaacgatatccatacctataccaacaatagccattagcgacgcgcttctctcattaggcgtttcatttcttcaacggctggtgcaagcccactaaataccgctcgaccaataatcgcatgaccaatattgagttcataaagttcaggtaatgcagcaatacgttgtacattatgataatgcaaaccatgacctgcattgacttttaaacctttagacgctgcataggttaccgcatcacgaatgcgaacaaactccttctcttgagcctgttcatcttcagcgtcagcataagcaccggtatgaatttcaataaaaggtgcgccgacacgatctgctgcattaatttgctcatggtcaggatcaataaataaagagactttaatccccgctaatgataaacgtttaatcgcatcagccactttctcttcattacccaccacgtctaaaccaccttctgtggtcacttcttggcgtttttcaggcactaaacaacaaaagtcaggttgagtttggcaagcaatctcaatcatctcttctgttaccgccatttctaaatttaatcttgtttgaaccgtttggctgatcagcattaaatcacgatcggtaatatgacgtctgtcttcacgtaaatgaatagtgatcccatcagcccccgcttgttccgcaataaatgccgcttgaaccggatcgggataagttgtgccacgggcattacgtagggttgcaatatggtcaatattaacgccaagtagaatatcagacatgctcttctcctgaaaaataacgttgtattaccttagtttacacattccatagagaagaaaaagacaatattatttatcctctatcaatacgctttttttcgcacactttttaatagcaaattgccgaaacagctctctactttttaatggttttccacctaaataaggtttcaaggccattcgtgtaaacctttttgctgctttcaatgtgccagccgtaggaaattctcgttttgccagcgattttaattccaatccagtaaaactatagtgatcaaccaccaaactggcaataaagcctttttcttctcggtatcgataagtcatggtatcagaaacaggttcaccacttcctgcacaatgcaaaaagtctaggccataacccaattgcgttaataacgctaattcaaagcgccttagagcagcttctggcgtggtttcactggcagcaaggatttgcaaacaagataagtattcgaaaaaaagcgtgctatatgatgtgccattttccaaaacacgagaaagtaattcattgagatacagaccactgtaaagtactgtgcctgttaatggtaatgctaaagagataggctcagcatcacggagagtttttatctcacctcgcccactccaacgaatgagcaagggagtaaaaggttgaagagctccttttaaaggagagcgacgaccgcgcgcaccttttgacaatatgcgcactcgcccttcattctcagtgaaaaaatcgagcaataaactcgtttcactgtaaggccgagcatggataacaaatgcacgttgccagccttccacttcagtaacctactattttaaatcgtccacatagccaaggctacgtaaagcacgttcatcatccgcccaacccgcttttactttcacccaaagttcaagatgaaccttgttttcaaataaatcttccatatccatgcgggcttccgtaccgatttttttgattttagcgcctttattaccaatcaccattttcttctggccttcacgttcaaccagaatcaaaccgtgaatatcatatccaccgcgatcgttagtaacaaattgttcaatttcaaccgtcacagaataaggtaattcttcacctaaaaagcgcatcaatttttcacgaataatttctgacgccataaaacgttgagagcgatcagtaatataatcttctgggaaatgatgaatggcttcaggtaaacagttacgcactattttagcaatagtatcgacattcatgcctttttcagcactaatcggcactacatctagaaaatccatttgttgacttaaaaaaccaatatgtggcagtaacttggttttatctgtaacgttatcaactttattaatcgctaatagcacaggacaacgtagtgattttaatttgtttaataccatttcgtcatcaggcgtccaattggttccttcgacaacgaaaataaccagttcaacatcaccaatagagctacttgctgcacggttcattaaacggttaatggctcgcttttcttcaatatgcaagcctggggtatccacgtaaatagcctgatatgcaccatcagtatcaatacccatgatacggtgacgggttgtttgtggcttacgtgaagtaatagaaactttctgccccaataattggttcagtaatgttgatttccctacattagggcgaccgactatcgcaataaatccgcaataggtttgttcttcgctcattcaagctccaattgtattaatgcctgttcagcagcggcttgttcggctttacgacggctggtacccatccctttaacaggttggtcgataccgcttatctgacaatggatcgtaaactcttggtcatgagcttcaccacgtacttgtacaacaacataagaaggtagtggtaaatgacgtccttgcaaatattcttgcaagcgagttttaggatctttttgcttatcacccggactgatttcagccaagcgattctcataccattttaagatgatattttcgatattttgaatatcactatcaagaaaaatagcaccaattaacgcttctactgtgtcggccaaaatagattcgcgacgaaaaccaccgctttttaattctcccggccctaaccgtaaacattcaccgagttcaaattcacgtgctagttcagcgagggtattacctcgcactaaggttgcacgcatccggctcatatccccttcatcgacacgagggaaacgatggtaaagcgcattagcaatgacataacttagaattgaatcacctaaaaattctaagcgttcattatgtttactacttgcactacggtgagtaagtgcctgtaaaagtaattcgttttgtttaaaagtataacccagttttttttgtaactggttaactaatagagtattcatgtgcgatcaatttccattatttaatttgaagcacacgcaacaaacctgtttaaaaacaacgagatattatcgggttgaataacagaactgttgcgtttgcactggctcctgtttatacaggagccaatcatgtttaaagaagtggcatattctacactgagatagaaaggaatgctgtagctattttgttaaaaattacttaatgccaccaatacggctgaaacgaacacctgtaggccattcattttcttgtttctcgaagctcatccaaatcgttgtggctttaccgactaagttttgctcaggcacaaagccccagaaacgactatctgaactaccatcacggttatcacccatcataaaatactgaccttcagggacaatccacgtaccttgaggtaatcccggctgaataaattcaggtacagtaacatctcccggaatagtcataatacgatgagagacatcaccaatcgtttcaattctctcttcttggcgaaattgcgtagctgtagaaattggctcttcaatcggaatcgatttcataccgctaatacgttgaccaccaggtacactttgtaacagtaatgtccattcactaggatacgctgtaccataggttaccgctatttcatcatcacatattgctttattacaatttgggtaaatgtgtaatttcttcgacgtcatgtcatacactattttatcccccggtaaaccaatcacccgtttaataaagtcagttgatggatcacgtgggtatttaaataccgcaatatcaccacgtttaggtttacccgtactaatcaaggttgtttgtgtaataggatcttttaatccataagcaaatttttcaaccaagatgaaatcaccgactaataaagtcggcatcatcgaacgagatgggatctgaaacggctcatacacaaaggaacgcaaaatcaatacaatcgccaatacaggaaacagagagcctaatgtctctgcccagcttggtttattaatcgattttgctaactcttgctgatcctcacttccctgcgttaactcttgtaaacgttttaacttcgctttacgggctggctttaatttaaaacgatctatacaccaaaaaatacccgtaattagcgttgccaacgttaggatcaaggcaaacgtgctagccatattttctccttaaattatttatctttaccaacatgcagtatggctaaaaacgcttcttgtggtaactcgacattaccaatttgcttcatacgttttttaccttctttctgtttctgcaacagttttttcttacggctaacgtcaccaccataacatttagctaatacgtttttacgtaactgtttaacagttgaacgagcaataatatgattgccaattgcagcttggatcgcaatatcaaactgttgacgtggaatgaattctttcattttttccaccaactcacgtccacgatacggtgcgttatcattatgggtgattaatgcaagtgcatcgactctctcaccattaattaagacatcaacacgtaccatgttggagccttggaaacgcaggaagttataatctaacgaagcataaccgcgagaggttgattttaaacggtcaaagaaatctaataccacctcagccatcggaatttcataagttaatgaaacctgattaccatgatagaccatattagtttgaacgccgcgtttttcgacacataaagtaatcacattacctaagtattcttgcggtagtaacatatgacattccgcaataggctctctgatctcttcaatattgttcagtgctggtagttttgatgggctatcaaccatgatgatatcaccattagtcatttccacttcataaactactgttggtgctgtggtgatcaggtcaagatcatattcacgctctaggcgctcttggataatctccatatggagaaggcctaagaaaccacaacggaaaccaaatcctaatgcagatgaactttctggctcataaaagagtgacgcatcatttaagcttaattttcctaatgcatcacggaatgattcataatcgtcagaactgaccgggaataaccccgcataaacctgtggtttgacttttttaaagcccggtaatggtttgtctgcaggcttctgtgcggctgttaatgtatccccaacaggggcaccaagaatatctttaataccgcaaactacccagcctacttcaccacaacttagcgatgttgtatcaacttgtttaggcgtaaaaataccaatacggtcgatattataaacttgccctgtactcatcactttgattttatcgcctttgttgactttaccgtttttgatccggataagtgagacaacaccaaggtaattatcaaaccaagagtcaataataagtgcttgtagaggcgcgtcaggatcgccttctggcgcaggtatttctttcaccagacgttcaatcacttcttttacacccacgcctgttttagcagaacaacgcactgcatcggtcgcatcaataccgacaatatcttcaatctcttcagcgacacgctcaggctctgcggcaggtaagtcaattttattcaataccggaacgactgtaagatccatatctatcgccgtataacagtttgctaatgtttgggcttcaaccccttgccctgcatcgacaacaagtaaagcaccttcacaagcggcaagagagcgagaaacttcataagagaagtcaacgtgtcctggcgtatcgataaagttaagctgataaacttcaccgtcatcagcggtataattgagtgttacgctttgtgctttgatggtgataccacgctcacgctcaagatccatagaatcaagaacctgcgcagccatttcacgatctgttaagccaccacaaatttgaataattcgatctgatagcgtcgatttaccgtggtcaatatgtgcgataatggaaaagttacgtatgtttttcattctgaaattatttttctctattgctttgctctataaatctggctttagcgtcgttcatggacacaaagcgaaaactctatattgcaggagttatgattgatgacgcattctacacactagagacattatactcaaagaaacgttcatcaaacacaaacatttatgataaagcttacctttatttatgcatcgtaactgcactttcactagatagaaatttgatttttatctatcaataaaaaagatcagaaccataaaataagtttaataacaaaaaaatggagcctatgccccattttttatcatattcattctttatcattattcttgatattgtacttgcaattcattgggtggaagtcctatttgtaaaataataggttcaaatccttcatctttactccaccagcgggcaatatttttagctaataaaaagcctaacactccccccactaaaccactacaaaaaatagccaactcactagaaagccacaggctggctatccctgcaacgataaataatcccagcaaaggagtaagataaaccaacatagcggagcgaagtaaactattttctgggataccaacttccactttttgccccaccactaaaggttgctcaacaggaagttctaactgatgaacagtttcagggcctattttatttaataaataagagccacaagctgctcgagcttggcaactcccgcaaccggacgatgagccataacgtagtaaagccctcccttgttgccaatgtacgactgttgcccactctttaaccataacttataccttttactttttggtaaacaccacactgttgacgattttctgtgctgttataaatggcaattgtccaataaaggtaatttcattgccatctttatcataggtataaattgtattacgaccatatctcaatgctttatcacgttcgggggaatttaattgctgaccacttttgttaacataaatggagaaatcgaataagccgtcactatataaaatagattgactaaattcattttcagcaatttgatgattgctacgttttacctctttaaatccttcaggtaacgttgtcacacgccaattgtaattcagtgcttgagtggctttggggatcaacaatagcgggggcatattcactttattgagtgaatctaactcactgatgatttctttattttgattagcggtgatcacccgaaattgttcaataacatcattatttttatcaagcagatcgacccttaatggcaaatatctctcttcatcaataaataagacatattcataacggtcattattttttgatagcacacgaacaacacgacttggaatgtcgccgatatgcgttcttcccgcatcaataaaattgtaatactcagcgagttcagcaaaattttgataaatgatagcagggagataatcaacgatatgttcattacgcaaactaaacgcatctaaacctggttcaaaataactgatttcattccctcgttgcacgatttctcgacgagtgctatccatctgcattaattgtgctactggtttaccatcgacaagtgcatgacgataacgaataggaacaataccttgagaattgatattaataaaagataattcgtaagtagcggtttgcgttgtattacccatcttttgcaacaaagcctcggcatttcctatttgaggttgtgccaaggcttgtgttggtattgataggtaacccgctaaaagtaaagcggataaccatgattttttcattacgactctattgttcctacacgtaattataaattgataccacaatgattactgagcctgttgctgagttgtgttttgcgatgctacaggcacttcatcttgtggtgcattgtagatacggcgatctaactcatactgttgcaacataagtccaaggcgttgattacgctcttgtagacgtgtttgttgattttggcctaaattatcactttgtaaatttaagctgactggtgctccattccccataataggttgagtattaaacaccggcgtatcaacttggaaatcctcagcgctattgttgccattatattgctgaacacccacaatgacagctaatgacacacaggcagcaacaccaatttgtgttaactggctagcccaaggacgtaatttttgtaagaaagagtgctgacgccattgagaaggcgcaggttgctgctcttgctgttgttcaggacttatgcggactggctcattttctaaagcgagtgctacgcgacttgcgatatcaaagtggataacctctcctacatcaccacgcattgcatcacgaactaagtggtaacgttgccatgtttctttcatagattcatcacgggcaatcgatcccattaattctttatcaagaacttcgccatccataaatgcagaaagtttctctttttgcatgtaaaagtacccttcagtaaatgagggttcagccatcttataactcttgtattaatggttgaaccttattatcaatagcttctcgcgccctaaaaatacgtgaacgaactgtacctacagggcaatccataataacggctatctcttcatagcttaagccgtcaagttcccgaagtgtaatagcaacccttaaatcttcgggtaacgactctatggtttgaaaaactactctccgtaactcttcagacaacattaaattctcagggttcgaaatttcttttaatgcgtttgatgtttcaaaattttcaacatcacttgcatctaagtcatttgaaggcggacgccgcccttgtgctaccagataatttttagctgtattcacagcgatgcgataaagccacgtataaaatgcgctatcaccacggaatgatccaatagctcgataggcttttataaaggcttcttgtgcaacatctggcacatcaccctgaggtacataacgggaaatcagacttgctaccttgtgctgatagcggataactagcaagttaaacgctttctggtcacccagttgtaccttctcgaccaacatttggtccgttaactgctcgctcattagagatggactctcccgaagtcaagcctcaaactatttttcaatgactccgtcatattactctcgttattccttctcgtttttatgagctacttacgttagagcattaaaatagaatgaagttcaattcaattataataataagagatgaatcacaaaaaactgtcgttgtaatcaccaaccaatctgcaatttgccaagaaaaaagcgataacacaatgtgataatttaaatatatacctttatttacaacaatatatacaatcttaaacaatgtaatattaacggcaacattagtctttaataatataaataaaaatctgtgacccaagattggaactgggttgtgtaatgaccgtcattattgcggataatcagctcttcaatattacatggtttagtttcgccttgatactgtctttgaaaggctagcaatatgcgatggtaaggcttatctgcactatctttaatattaactcgctgtacgacattccacccttttctttgtgagatttcaataaactgttcaccgattaaatagggtaacaccacacaaaataggccttcatctgtaataagttgttgtgcactgtcaagcaaaccttcatgggtcaacgttttcgtataacgggcttgctcgcgctcttggttacggcatgcaaccgctggctcaaaatagggtggattactcacaataagatcatagcgagttggcgcttgttgcgcatattgataaatatcatgatgataaatatggattaacgaactccactgtgattgttgcgcattttcactcgcctgtaatgcggcatcttcatcaagttcaataccatcaatacgctcaacctgcggggcacgttgcgctaacatcaaggcaattaatccacttcccgtaccaatatcaagcaccgtttttgctttagtgataggcgcccaagcacctaataaaacgccatcagtacccactttcatttcacacttatcatgagcgacaaaaaattgtttaaatgtaaacccgcctttgcgtaaacctgctttctttactttcttttgcttcattgaatcgctctaatgatttgtataactctttctattcttagaatgaacgcaatccatataatagaaaaagcgatatatggtaagataacttttttgctacctctatcttaacattaaacgctttatattcgatgcttgcttattgactttaagcctaaaaaacaacacatagctgaaacaatcgatgatatataatgtgatagcggtaaatcctctggcttttaacagaggataatgtcaaaatccgcgccctaaatagaggtatacaatgacagccacgacattttccagtcttgaacttgatgaaagtttattgaccgcattagaagaaaaaggatatcaacgtcctactgctatccaagcagaagctatccctgccgcaatggaaggacgtgatatattaggctctgcaccaacgggtacagggaaaacagcggcattcttacttcctgctattcaacatttacttgattatccacgaaaaaaatcagggccacctcgtgttctgatcttaacccctacccgtgaacttgctatgcaagtcgctgatcaagcaaaagaattatgcgctcatacccatctagacatcgccactatcaccggcggtgttgcttatatgaatcacgcagaagtttttagtgagaaccaagatattgttgttgctacaacaggtcgcttattgcagtacatcaaagaagagaactttgactgtcgtgctgttgaaatgctgatcctcgatgaagctgatcgtatgttagatatgggttttgctaacgatattgaaactattgcaggggaaactcgttggcgtaaacaaacattactcttttcagccacattagaaggtaatgctgtgattgattttgcacagcgaattcttaatgaaccggttgaactgaatgccgacccttctcgtcgtgagcgtaaaaaaattcaacaattttactatcatgcagataatcttgaccataaaactgccttacttgcacatttactcaaacaagaagaagttaaaaaatcgattgtttttgtacgtaaaagagagcgagtcagagagttagccgcagcattagaaaaacaaggtatcaaagccagctaccttgaaggcgaaatggctcaaacacaacgtaacgaagcgattaaacgtgtagagtctggcaaaatgcatgtgctgatcgcgacagatgtggcgtctcgaggtcttgatttagaagatatcacccacgtctttaactttgacttaccgcgcaccgctgatgtttatttacaccgtattggccgtacaggtcgagcgggtcgtaaagggactgccatttcattagttgaagcacacgattatccgctacttggtaaaattagccgttatatccaagagccgattaaatatcgtgttgtagcccaattacgtccagtaactaaagcccctagtcaaaaagcatcatttaagccttctaaaaaagtattagcaaaacgcaaagcgaaaaaagtagaagagaaaaaaaacgttaaagagaaagtacgcgcacgcgatcgtaaaaatattggtaaacgccgtaaaaccgctactgataaaaccaccatcactgcggaaaaaactaatcatataaaaacagagcaacaataatctgtcttttttacgttactttgaaccataataataaaccgtcgttatttaatagcgacggttttttatcttatcttctttattgataaacaaaaaacctgatataaacataccaggttctatcattacttaataatttttagtgaaaattacaggctttcagtgaaagtacgagtaattacatcacgttgttgttctggtgtcagtgagttaaaacgcactgcatagccggatacacgaatagtcaattgaggatatttctcaggattgttaacggcatcttctaatgtttcacgacttaatacgttgacgtttagatgttgaccaccttctacacgtactaccggtttagattctaccggtacttcacggtattcgatgttgcctaatgcatcacggctaacaacttggccttcttcaaagccttttttcgcacaaatacaacgtgcttcgccgttttcatcatctaacaaccaaaaagaatgtaataaatcgtcgttatcagctttagtaatttggataccagtaatcatttcgacctccaatgtgggcacaaaatcaaattctaatggcatatcagaatttgggtatttggtctaaccaatgtttctgtttacttatataccagtataaatggcgtcattctttgataaatatcaataaaattgataaggacataacgggtaatggtgcaaagtcttgttttaaatcaataattacaacccatataattgcaattttttttgtaaattttcaaaaatttttttaaataacaattaattcgattttttcgagacggaacattttctttccatgggtgaaatcggtaagcttagccccataagatatcaacaaggattttatgttatgactacaccattaacttggcatgatgtaataggtgctgaaaaagaaaaaccctattttcagcaaattttgtctcaagtcgcacaacaaagacaagcaggcaaaataatttatcctccacaagaagatgtatttaacgcttttcgcttcactccctttgaaaatgttaatgttgtgattttaggtcaagatccttaccacggccccaatcaagcccatgggctttccttttctgtacgtcccggcgttccggctcccccttcattagttaatatgtataaagagcttgaacaagaataccctgacttcaaacgacctaatcatggttatcttgagagctgggctcaacaaggggtattactacttaataccgttcttacagtagagaaaggccaagctcactctcatgctaactatggttgggaagtttttactgacgcggttatcgaacaaattaatcaacgtcgtgaaggcgttattttcctactttggggcgctcatgctcagaaaaaaggtcgttttattgatactaataaacactttatcttaaaagcccctcacccttcaccactctctgcacatcgtggttttttaggctgtgggcattttaaacaaaccaataatctattagcgcaacaaggacgcacgcccattaattggcaacttgatcctattgaataagctagtgataaaaacacaaaaccgcacaaaagtgcggtttacttatcccacgctctgacttattggcgcattgatataagaattatggctcttatttcgataccactaccattgctggacgtaatagacgaccatttaaggtatagcctttttgcatcacatcaacgacatggtttgcttcatgctcagggctatcaattaatgtcatcgcttggtgtacttcaggattgaaggcgacatttttttcttcaacgacttcaataccaaacttacgcaccgcatctaagaatgatttcagggttaactctaaaccttcaatcatcggttgcatttgttcattttcatgatcagcggcagataaagcacgctctaaattatccaatacaggtagtagctcattagaaaatttctcaagcgcaaatttatgtgctttttcaacatcctgttgagtacgacggcgaatattctcaatttcggcttgagcacggatcatcgcttcacgttccgttttttgtgattgctgcaactgtttttccagctcatcaacgcgtgcaagcgcttgaactaactcagcttgtgcatcaaactccgcctgagcgtcttcgcttttcacttgctcttgagattcattcattaccgattccattccttctttttcttttgagacttgctcttcatgtacgttttgttctttactactcatgaatatctccgcgtagttttagtattcatcttcatatttagtttattatggggatcaataaacgggtttcaaggaataggcgctaaacgagggtaaaaaaaatgccagataataccgtaacggaagaaaaacaatttaaatgcattggcatcgtcggtcatccccgccatcctgaagcactttcgacacatgaaatgctctattattggctccttgataaaggatatgacgtcattatcgatacccaagttgctgaagaattaaagctcaccgatgcacaaacgggcgatttaacacaagtcggcaaactcgctgatctggttattgttgttgggggtgatggcaatatgctaggcgccgcccgtgttttatcgcgctataatatcaaagtgattggtgtaaaccgcggtaacttaggttttctgaccgatcttgatcctgataacgcattacaacaattaactaatgtattagcaggccattatcgtgaagaaaaacgcttcttacttgaagctcgcgtctgtgctgaaggacaaagaacacggattggcaccgccattaatgaagtcgtacttcaccccggcaaagtggcgcatatgattgagtttgaagtctatattgatgatcgttttgcattttcacaacgttctgatggtctaattattaccacaccaaccggatcgacggcgtattcactctctgcaggtggccctattcttacacctaatcttgatgcgattgcgctggttccgatgtttccccatacgctctcttcacgccctttagtcattagtagcgacagtcaaattcgcttaaaattctcacaaaccaatattgattatgaagtcagttgtgatagtcagcttgtattacctatcaaagaaggggatgaggtaattattaagcggagtcgacaaaaacttaacttagtccacccaactgactacaactattttaatacactcagctcaaaattaggttggtcaaaaaaaatgttctgatttttgtgcctcgctactttactgtataaaaaaccagtttatactgtatgtaattacagatatgtttttatacaggagaggcactatgctgactcaattaactattagtcattttgccatagtccgtgaacttgaaatcgacttttctggtggcatgaccacaattaccggtgaaacgggcgcaggtaaatctattgcgattgacgcattaggcttgtgtttaggaaaccgtggtgatgctaatatggttcgccctggtgccactagagcggatttatgcgcacgattttcactctctgataccccttccgcccagcgttggttagaagaacatcatcttgacgatcataacgaatgcctattaagaagaaccattgcagcagatggccgctctcgtggttttattaatggtacttctgtccctttgtctcaactaagagagcttggctcattgctgatccaaattcatgggcaacatgctcatcaacaactgttagagcctcgctaccaaaaacatttacttgatatctatgctaatgaacctgctttattaaaaaagatgaaagcggcttatcaaacctggcatcagagttgccaaaccttagcgacttttcaacaacaatctttagaaagagaagcaaggcaacaactgattgattatcacttaaaagagcttaacgagttccaacctgtcgcgggggaataccctgaattagatcaagaatataaaaggttatctaattgtggtcaatttctgaccttgagccaaaatagtttacagatcttaagtgataacgaagaacaaaatattttaagtatgctgaatgtggccaaacatgagatcagcgaactttccacaatggagagccaatttaattcactgttagatatgctggaagaagcaagtattcaaattagcgaagtgagtgatgaactacgccactacagtgatcgtttagaaatggatcctaaccgtttattcgaattagaaaaacatatttccaaatatattagtctatctcgtaaacatcgtgtcacccctgaagagctatatgaattgcatcaacaattaattgaagaaaaagaggcactattacgccaaaatgatgactgtgatgcattaatggaacaagttaaaattgatcatgcagctgcattggacgtggcaaaacaacttcatcaaattcgtcaacagtatgcacacgaattaagccagttgattaccaatagcatgcatcaattatcaatgcctcatggctatttaactgtagatacattgtttgatgaaaatgtcttacaaattgatggtgcgacaaaagttgagttcaatgtcaccaccaacccggggcaacctcatcaagctctctctaaagttgcatctggcggtgagctatcacgtatcgctcttgctatccaagtgatcaccgcaaaaaaaatggatacacccgcgctgatttttgatgaagtggatgttggtattagtggaccaacagcagctattgtcggtaaattattgcgtgaattaggcgaatcgacacaagttatgtgtgttactcacctaccgcaagtagcaggttgtggtcatcaacactattttgttaataaagagactaatggtgaagagacagaaaccaccatgaagctgttaactaaaaaagagcgtttacaggagttagcccgcttattagcaggaagtgaagtgactaaaaacacccttgctaacgcaaaagatctgctggcagcctaacgattaacaaacttttatcgatatttagggtcttaggcagagcgtgaaaggttttcaattgctgcattgtcgattatcatcgtcactatgaccctaaaaggaatgtaatagccatgcgttttaaactgttaaaagttgccgccttatctttagtcgtaatgacttcaggttgctcgatgttcgaaagactggtttatcacccagatatcaatcagggtaattatttaacaccagccgaagtcgccaaagttcaacaaggaatgacacagcagcaagttcaatttgccctcggaacacctatgctgaaagatcctttcggaactcaaacttggtattatgttttccgtgaacagccaggccatcaaaaagtgcgtcaagaaactctgacactaacatttgataataatggcatactgactaagattgataaacaaggtgatatgccgagtttttctaatcaaaccagtaaagactaatctcactatacgattggcaaaaacgaactgcaccccatttgtaattcaacaatggggtgtgttttataaccaacatatcgacgcaatcaatgagatacaatgatttgattatgacgtggtgaaaatgttaactattcagttttttggcgtgctttttcagcgcgtttacggcgcatctctttaggatcagcgattaacggtcgatagatttcaacgcgatcgccatcacgcacattatcactcaattttgctggccgactatagatacccactttatttttagttaaatcgatatcattacaaatcgttaaaatatttgaggcaataattgcttgttcaacagtatcccccagtgttagctccacagggataacatattgtttatctggtaacgcgtaggctacctcaacccatattttagtcacgataaatctctttcgctctttgagtaaacgcctgcaccatattatttgttaagtctttaaaaatacggccaaaagctaactcaattaatttattggtgaactcaaagtctagctgaaactcaaccttacatgcattatcatctaatgcggtaaatacccagcctccggttagtttacgaaaagggccatccacaagacgcatatcaacacgttcattggtttttaaaaaattatgggtagtaaatgttttactgatccctgctttagaaacctgaacagatgcaatcatttcttctggagtgcttttgatcagtttacttccaacgcatcctggtagaaaatcaggataagtaagaacatcattcactagtttaaacatttgctctgcactaaaaggaactagagcagatcgactaatctgaggcatagttattcctgtacgacaacactgtgtgcgatcatatcattgaacagtgattaaataaaaatctaatggaatatagcttaagttttacgcaattgaaaagaaaacagacgcttaaatgatttctttctattgctcatacagtataatgtggaaattatgacaaagaaaaaatcacacaaacccggctctgccactattgcactcaataaacgtgctcgccatgaatatttcattgaagatgaaatcgaagcgggactgtcgttacagggctgggaagttaaatcactgcgtgcgggtaaagccaatatcagtgatagctatgtaatcatgcgtgatggtgaggcgtacctgtttggtgccaccattacaccgttaaacgttgcctctactcatgttgtttgtgatccgacacgtacgcgtaaactgttattaaaacaacgtgaattagctaatctctatggccaaataaaccgtgatggttacaccgtggttgccctttccttatattggaaaaatgcatggtgtaaaatcaaaattggcgtagctaaaggtaaaaaagatcacgataagcgtgacaccataaaagatcgtgagtggaaattagacaaagcacggatcatgaaaaatgctaaccgctaaattgcgttaactactagcaatagcaggtatttttctgatatactcactttcaacaacttggggctgattctggattcgacgggatttgcgaaacccaaggtgcatgccgaggggcggttggcctcgtaaaaagccgcaaaaagatagtcgcaaacgacaatcaatataaagcactagcagcttaataacctgcctagagccttctctccctagcttccgctcttaagacggggataaagaggagtcaaacccaaaagagatcgcgtggatgcctagcttggggttgaagcgttaaatttaatcaagctagcttatttgtggcgtgtctgtccgcagcaagtaagtgaatttaaagactagactaagcatgtagtgccgcggatgtagaaatttcggacgcgggttcaactcccgccagctccaccaaatttggtggatcagtgataggacaacggtttcaaaaacaagaagttagcgaaatcattaagactatacactgacaacaaaaggacttgaaagtgcacgcgaaatgcacgtacatttgaataaagagccccaagggcaactccttggggttttctatttgtaacaatatgtaataaaatatttcattcaatcccttcgttagaaagaatttctgagcaatattaattcattaaatacgaaataatatgcatatcacctaatcctcttgcttaacacgttaagatgataaccccttttatttgtatgtcttattggttccttattgtaggatagatgtaacccacaataagggattgcacaaatgagaatgactcagcacagcaagtgaaattatctagaattaaaactttcaaacgcattgaaaataagaattattaccattaatatgggtatcctataaaataggactaattattcattaggagctgaatatgactaaaaaatattatattcataatatgttctggggctattttatgatgttggtgatgatttatcttaattataacgatcacactattgaaagcgtattaatgctaactttaagcatacctagtgcaattttttttcctttctccaagatgcttatcgaaaaattcacattaaaatatacaacaaaaaaattctggaatactggattatttataaatacaccagctaaacatggtggagtagctctataccacttattttgttttatattttcaattccatttagcatgatatatctagctctatatttcacaaaaaataggataaccaattaaaatcgattatcctattagcctacatattaaatacctatcgcactgctgactttttcaaccaaagcatcgtcaatcaaggcactaactgttgcaatgatgagggcataccctaaaattccaacaggcccaccgacaattaaactaaaggcaaaggctgtcaatgccactgctgccataccagcagtaattgcagtggctttaacaaaaaatggacgccaatttcctgttttaaccgcttttttaaattcaacaagtaattccacggcattaatcgcgtgattggtatatccaagccctttactaaatttacctaagtttgaagctaactgttttgcatcaatagattctaatgcttttataatagcagctctatctttggcattaattttattattaatattctgcccatatttttcatatgtacgcaatgcatcctctacacttctgattgtttttccttttgcttgttctgctaattctctagataattgagccgcctttttaccaaattcttgagttactttctcataaaatgaaattgtaaatttcacaccatctttgatgtcattaaactctttttcctgctgaggacgaggatctttatccttcagtttaattgcaggaaagcctgaataaacatataaagggggtaaatttgaatttttaggaaacacaatgattgcatcattaaattgatgcggatatggtacatctatccttttgttttctaccttattaggtaattctattttttctggatatgagaattttttattttcatttgaatgtttttgaataatatttccttgtaaaccaaggccgctaggggaactagtgggcctaagtaaatattctattcctaaattctttatatctacatgatagctattagcagcgtaattaactttatatacaggaacttcttttgtcaccaatacaccatcagttccaactaacgcggcattcgctttattgttttctttaattatagccattcttgcattaacattaattgttccattgttttttgcaatttcattaagttttccagacatcaaatcaggattattaattaagttttctgcaggaatggtagacataaggtcaaactcattaaatgaattattatcaaattcactaaactccataaattttactgagttcaccttattatcatcaatacggttttctttgctgtataaactaataacagactctattaatttatcttgaattaaattaatagcatcctttgtaagaaaatatttctttttaaatgtctctagttgctcaataacaacgccattgaaatgcatcacacctttatttgtaactaattcttccttatttgagctgttagttagtttattattattgctagaaataataacgggtatttgcggtttattcactttaaatttagtatttggattaaaaggtgatgatccgccattacccatattaggaaatggatattcatctttatcactatcagcaagagtgggtatttttgaccaaggtaagttatttgatgtagctggcgtcacaattaaacgttccaccccattatctacactgaccactcccccttcagtgatccaaccaccatcttcatcagcccctccttccgtatcataaattaagccattttgttttatatcacgaataatatcatctgggagcgatgggtattgatcaacgttagctcttgtaataagcatataaactcctttttatgtttgatagcacacaaaccctgtgtgtaaatacagtatatacagagaaaatatcgtcagacaacctgtttgtttcggctatattcggaataattatcattattctttagctcttccttgagccaaataaatataatcaatcaattatcaatttctggtgcgctattgatatcctgattttcttcttctttttgtctgcattcttcttccgctttctgcgcttcctccatctcacgcattctcacgttatagatggattgctcaggcatctgtacacgaacggaaataaaacgaccatcagggatatctattgggtcgccgtctttgtaaccatcaatatcattacgggcgaatttaggtgcgttagggtgagttcgatgatacgttctcacgaggatagaaccgtcctccataacttcagagtctacccatatcaacggctgtttattaacatcaagtggaatttcaataccaccatcgacaccgccccaacctgcatctgagttaaagcctaaaacaccttcgatgaaatattcaccttgagctactcgagtaaccgtagcaccttctgattcgtcgttagtgatgaatgaaccatcagaattgatattaattattggggaggctttcttaataaacccttgcggagctattgtgaatgagtacccgccactcatccgcaagtaacgggtatcgttttatttcatcccttaaaaaattaaggcattcttaacgtgacaatgaatgctgtatatccggctgcagcatcttcctgaatattttcaatggccaactgattattttctgatattttgttctcattaaataatttagttttgcctgaccaagatgcacttccatctggacggaatccaggattcagccagtgaccaccatcgatacctgaaatccacagattacgctttgttgcctcctgacacacttcaattgcagcttttggtgataagtacatgcaggcgttgccttttaatttaaagaattcttcaccattgttatataatacgttgtaatcaaataattttttttccatcattgtttctcccattgaattcgtgagtcatcaatccatctaggatcatttttattactaatctgtgctacttctccggtgcgatcattcaccaccacatattttcctggctcaccatacactgtggctggatcattacgacctaaaccatcatccgtatttttaggtctacgctgatcaacagattttcctttagcacctttagcaataacatcttggatatctttttcactccaaccacgtcctcccatctggtcttgaatttttccttcaattttaatttccgaagaattgtcttttttccctgtcgacaaatagatcggttttatccctaattcccacggaaaaatcaaaatcacgggctctcgcaatatcgactgtcttttttcattttcgctgaaaaaagtaggtgcttctaacggcaattcattaaatcttgaaatatcatacaccttaccaggtagatacctatgccttttcggttgaggtggggcgataccttttaaaatcgtcgcattgcctatttgaacctttctttcttgtttttcatttggtaacgtataggcaaaaacacctttctcggccgtttttctcgcttctaccacgcgtgttttaactggggtctccgttttcactagttcaatttgctttgctccgttcacccccttttcaacaataacggcagacgtatttatcatgcctttttgtttcgctatttctcttaactgagtttctttcggaatatttaataccctaccttccctcgttaatgcggtttctctatttttagggtattcatcataaatcatggctgggtagcgatcactgccttcacccaccggaggtgagtacaacatcagccctgcccctaaacccagtgcccgacctaaaatcgctcctaacgtttctattgctgttgttgtactagcagtggttaacgtaggcgtaaaaacagcaacaggcgcgagtgtcgctttattaagcgtttttcctggaataagcgtcgattgtgcggaggtgatagccaaatttaactctgaggggattggtttattgatataattaccctgagtgaaatgtgtaatcgaatcaaaagtatcaatcgctttctttaatgcaaatctctgcatgccaataaattgagcataacgttgcataaagattttatgcgctttagcgtactcccctgaatgatagagatccatcatctctttgcaatgcttatctttagtcaaaaattggcagtccattttgccacagacaggacaaatatttcttttcatcaaatccaatgacttgataatgggtagccttttttcatccataaaaatttccttattcatttatctggataaagatagagtatattaaatgctcgacaagctaagtatgatttacactgtgtataaaaacagtgcatgtagcgtaaataccctcaggcaacccatttatttaggccgcattaggaatgattattattatcatttaattttcccttgagcaaaataaatataatcaacccattatcaattttggtatcttattgggtcctaattttcttcttcttctttttgtctgcgttcttcttcctaatcaacggatacaatattgttcgtcggaatatcaggaaattcataaaaaacataatattcaatgttctatgagagatagttatgactgttatcaaaatacattagcagagtgagtcaataggatattaaaaatagaatactagttaataaagccgagaaatttagaacaagatcagagattggttgacgaatcaatacagatatagtcattactagctatcaaaccgtggagctaatacctctcgattgccattacaattttgttcactaacgataccctgtaattctaactgctctataatccttgctgctctgttataaccgattcgaaattgtctctgaatacctgaaatagaaacccactgttttcctaccgtaaattcaactacttgagcaaataatgggtcaagctcttcagctgacatatttgtattctggacatcatcataaagattaagataactcacgcttccccatcgtttacaataatcgaccgcatccctaatatctgaatcactcacataagcaccttgaattcttataggcccagagaaactcggtgatacaaataacatgtcacccaaaccaaatagtgactcagcgccatactgtccaagaattaaattagaatcagccctagacgatacagaaagagcaatacgtgtagcgatattaattcgaagctgtgaaccgatactggtggatacagggctacgagtcgttagtattagatgaatgccaaccgcataaccttgctgactcaatagaactaacatctctcctatttgtttatactcgccaatgagttgaacataatcatcaacacaaacaacaatttcaggctcactgtctaaataaggatgctcactataatttttattagagcgcccaaaaggatcaggtataggcttacctaactcttttgcatttgatattaccttattgtaaccactcaaattgcgctgatttaacgcactaaataatttttgacggcgttgcaattcagagactaaaaacgataatggctttattgattcaatagaatcagaggcaacaggaaacaataagtggggtatatcgttgtataaactgagttcaagctggcttgtatcaaacatcacaaagcgaactttatccggtgggtttctgtataaaatgctcattaccaaggaatgcattaacattgacttacctgagcgcgttacacctgtaataagtaaatgtggcatttgagccaaatcccagcctattggttctcctataatatcttctcctaacatgacagaaagggaagataacccattgttttcgttccattgattaaagcattcaataaaaggcaccgctcgacgatatgtgttagtcacgcgcaatccgatataaggtgtacccgcaataaaatcaataacttttatatcaacgacgctcagggaacgacacaattctggcactaacgctatcacttgagagacttttatccctctacccaattcgattctaaagagggtaaatgttgcgccttcatcataaccgacaacctcacctctaatttggtattgcaaaaagcaagactcgatcgcttgagccattaaatccaattcttgagatgaccagcaaagctcagaggtatgaataaacggttgtgccatcaatttctcccatctagggggggttaattcagtaaattagagtcaccttcgatatttcagcgattaccaatcaccccaattgatatttcttaaagttctcggcttgttccagcacacttttatatacttcatcattggccactggcggaaaaccataacgatgtaataacaaaatcaagtcaactttcagcttcgctttgatatcttcccggttgctccagtcagggtattgtgtgctgtcatcgacaataagtttcatgtccttagcaagtgccagcattttgtcgtcatcgtaggtaaaatcgtatttctggcacatatgctgcaaaatatcgagaaaggctttctcctccatatcgatgccgatatcctcaaatgacatcatttctgccttgatgtcataaatcatatccgccatttgtgcagtgaaatcgtcgaactcttcgccattgagcacatcattttctttgcgttggttatactgctcaaccaatgcttggaaacgcttagagaaattaatcccttgcagctgattgaccttttggaaatcactaatggccttttggagcatcttttgcaacagttgcattttagtattcggcaacttgattttattgatacgagccatgtattcatcatcaaaaatatcgatattttcagctttttcgtcccctaaagtgaagatctcttccacgccttcggctttaagggcttccgctatcatctcacgtactttttgattcatctgcgccgtatctggggcatcacctttggttaatttatagactatagagcgtacagccaaataaaaatggatatgttcacgttcatcttgggtgatatcttcactgcccacgcaaatatcataagcggctttcaaccgctttactaagcccataaagcgcagttcaactttcttggtttgcaggacaaactcagccgcccgattaaggcagtctaattgccgtgttggcgagcctgaaaagtaatcgcgactatcgaattgatgaaatacctgtgaaagcaaattgaggtgattacggacttctacaatggattgctgaacatcttcaaagttagacttatcggctttagaatacatcgccagcgccatattcatacggcttttaatcccgatatagtcaacaaccagccccttctctttcccctcaaaacgacgattcactcgagaaatggtttgaataaggttatgcttttgtagcggcttgtcgatatagatggtatctagctcaggcacatcaaagcccgtcagccacatatccaccacaatggcgattttaaagttggatttcgggtaatgcgcccgttaaggatgcgttgcttttttcgatagtggataatgcagtatcaataatcaccgcgatatcatcttgtttcgcacgctcttggacataagaccaacgggatacttgtggtaaaaagaaaacgttatcttgttgatagaaaacatccatatcaacaaaagcttcctgaccatttttgattaattggctgcgtttggcttcgaatttatcactgataaatttcaggaacaccaaactgagtaccacatgcttatactcagaagattcaacactgcctcgcagttgattagcagtatcccaaagggtttcttcaaagcctttggttgttttcttcgcgggtgatttagccatgtcgatagattctcttttttatcagttattatcggcaagcgctaagttagcttcggttatttttacgctaactgccgataatatatacaaaataggtttggttaagattatctcataaaatcaggttggtttgggtggtaaaagctaaattatatcaacctagatacccaatatttattgctgagcgttaggagagtaaaactgataatcaacaatatctgcaccaataggccctgtttttgctgtaacccatacggttcccgtattttccttggttttcgattttggatctctaatacaccaaaaaacccattcccctgtataaatttcttttatccgtataccatattcacattgaggggctttaagacgttcaggccctggcgagacgatatgatattgtgtttggtagtgaattgtttggtctaatgataaataagcaagcacattaaaagttggaataattatcataaggccaagaaaagccccccaataatcactgataacatactttgatgggcgaaaaaaagggtgccatattcccccaataatccctgtgaaaatagcaaaaataataataatcgtccatttaggaaaccattcaaataatacaatgttatcgcctaaataaagcgacaaaaatagataagctaaccaagagcagtacaggataacaaagatgtaagaaggtaatgattttttcttgctgcctttactatatgatttgaattggtattccataaaaaccttaatttatttccctaaattaatgacaacccggctgattatagttacttatattcttgtatagcaatatcgtgttgactagggtacttaattaaatttgttacccatactccaaaccagctatctatttactggcataatcgattgtagaagtaagcagaagtattaaccttagcgttcattacactgaaatatataggtcatcaacaggaaatattccgaatggataacttaacggaacatcgcaattcatctttggcaaattggcttccagatttttttaaacaatggcctaaaaatatcgattggtctagagaaaaaaagcacaccaaaattgatatcaatacagcagaattaactcagtttctcaaccaactgtctgctccccttaaattagtacagcatcgtgctttatcgtttgatccatgggaagtagcaggccttgaacgtaaagaagttcgcaatacagccatccttgcttggcttcttgatcctaaggggactcatggttttggtagattaccattgcaaacactgttacagataatacggcacaacaaaaatgatattccaaaagattatcatcactattgtcgagtgcaagttgaaaccaatccaactggcgattgcaccaatcgtgttgatatagaaatcgatgctgataattttcttctatttattgaagtaaaaattgatgctaatgaacagccagaacaaatagcccgatactgtaaggatgccaaacagcgttccatgtcacggccatgggctgttgtctttttaacaccacaaggaaaagaatcacagacccgtggtaaagactttaaatctgaatatgtgccatgtttatcatggcgccaactcgccagtagtttggaagatcccttgcaatcgcactataacgaattcatttctgctgataactactctccatcacgccaaatagcagcacatgccgtattttgctttcttaatcgaattcgtcaattttaattcaaaggaatagatatgaataaactcagtgaaacagaacgccaagcgggtgtacaacttctctcacaactgaaaatgtttaacgaggcggttgtttattttgaccaacatatagaacctgctttttggaaaagttttgataagtgtattgaccgatttatcaaaaataataattgggcaggtgatgctgattatgaaaacaaagggtattgctggctcgcaccgaaaaattggcttattgaagatgataactgtaaatattattttgcaactagtacaactgttgatgaagaactcgactataccttagccgttctgactggtcagggcattgagcaagggaattttggtttcgaatttcaattgaatgccgcgcattttggaggagccagaaaactggctagttataacaattcaatgtctgaaaaacataaagaagacaaagaaaaattaataaaaataggcttaaaagatcaggtaaaaggtaactattttattcctatcataattgattcaaaattacttgctgattgttgggcgctcaatggtgaattcccagtagagcatgagattttttctccgcttagaaatgcccttgagatactattcgaatcaactaacacattggataatatgttccgagatgccattgaagtgagtgaataagcttcgatgatgattatcatttagtatggttaggctttttggttattaaattcgcagctaagccagcgggcaaatgccatagcccgtttttcaaagtctgctatgctctctcgaggtttaatactaatttctaataggtaatccatatcttccgctaatgcaggataccgtgaattaaatttggcgcggtactcatggagagagtccggccagtcattatcttgttcactacgaaggatgttggttgctctgataagctttcgtgcagccgagcgccgaagctgtaactttttattttcattagaagatgcttttatttgaatgactagtttgtccaaaacctccataaagtcaccattcacggccactgcaatagcttttgaaggtttgaaagcttgaaagtgatggcttaagtcctcgccataaacgcagtgacaatgatgtttaatccagtatccccaactgagtacattatctggatcgagaacctgttctaacagaccacaatcaaaatcaattttactgataacgggattgttttttttcaagaacagactgaacagttgcaaattgctctttaatagtctgatcaggttcatatttgaaaataactgtcatatccagatcagacttacctacttctgcccggccttcagctacacttccgtatacgtatagactgtgtataagcttaggaaagtaacgtgttagatttgtcacaacacattcaattatatgtgagaattcaggttgaatttccgcgcgtcttggctgggaaataaaatcattatgatcgacggccatcttttctcctgtttgctaatgttatttttcctgataacaggcattttgaacctgaaattgttgtatccaaactattatgccttaatatccactcctctcttacagtagcatttttcacgaaaaccataaatcagcataatggctaacacacctgctatctgatccgcagacttccgccgactattgggttttatgcacttgaacgcaccatttatatcactggatcctcaaagaacgtggcaactggtttgagaagactaataagcttgatttagctaacctaattccagagtataaaacgtatcctaaatactaaagcgttttaatgcgtttattatcttatcgtttttatattgaaatacaaaacactctaaataagagtatcgcattataaatttcaaccattaaatataaacattacatatctattaaaaataaaaattaaagttaaaattaaaactccattttaaattatcttttttagataatattagatattaaaataaactcagtttaagagagtctaaattggatatattaaaaatatattcagatatcattaaataaataaacaaaaggtgtattatataatattgttttgttatttatcctctaaaaaagaataaaggaataatgatatgaaaaaagtattactcagtcttgctatgctgagtgtaatatcaacgccggtattggctaaagctcctgtagctaacttaaaaatcaatggtgatattaagccaccaacttgtactattaatggggcgacacaaagtgatatgatttttgattaccgagtcataagcccaacgcttatccctcaatcgaaaaactacgaatatcctaacggtatagtccaaaatacagttacgattgaatgtgatgctaaaacatatttaacctttgttgcatctgacacttatgacagtgcggaattagctaataatacgctagcacagtttcatttagttgataaagaaaatcctgaaaccgcagttggagcagcctcttttttgtgggaggatgtgactgttgatagtaaaccagcgtacatttcacgagcaaatgatgttactatcacagagacaaattactataacgttctatacaaaggcgcaaccaatggttggacatcagaacaacaaaaaggcaatgttagtaaagaatctctggcactaattccaggtgaagttttccaagcagtttttaaagatgtatataaaattccttcttttcttttatccaaagatgcattaaataaaaaaggaatagatttatctaatggcttagattttatgggtgaagctgttctcacttttaactttggtgtctaatttttaaaataactgataatcacaatatcattaacttttatattgtgattatctttacgttaaaagtttaacagtgcttggcgcgctattaatgttctgaatatcaaattaacacatcattcaatcaggaacgatacatcaatacttcctttataagtattcgtaggtatattcccattggcacaaaggttgaatgataatgacttataaacagatcccccattatatttgcctgaaggttgtcctgcataaaactctaaagcttcggaggaattgttattacatactgcattagttattgttttagttgcatcagataccgtgatataaggtgcaacttctttatttttcaaagggatacttggagacattgtcatcccagttttactcccattgactagctcattatagggttttaatgtcacatacatatttcctgaatgaggacaagagacaagcatactagcgacactttgctcaagtaacttggctgacttaaaattttgtgctagttgaatagcaaattgtatgtttgttgagctagcaggagaaacattacatgtttttaagacgtgaataggaccattaccaaatgaaaaaggaactgaagatagatctggaggagcatcagttgcagtttgagctgtagtaaaatatatcggagctacaaaatcgtaaataccaggtttaacatgacctactgcataaatagaataagagcttattctcaaactagtattgtttacacgtgatatataaccataccagcacattgggtgacgatagacaaattgatccgcatactcagctgttctagaaacctcttttcctcggcgcagagtaattcgagtcggagaatatgttccattctgataatacaccgcatcgatagatactattccattgatagctgcaactaaataattttccctattttccgcttcacttgcatttttattatataattttaatccgtactccccctcttgacttcctgggaatgggaataaaaaactctgccattgtgcactgtttttactacaataatctacaacattattaacacctacagccgctccataggtattaccactactactaagtgacatatatgattgaggaggtgttaattcacctatataccccgttccattatctggaataacaagtgcttttgttaggagagggaaaaacagtgacaatacaaaaagactgattttaatagttatcgttttcaattttcaccaccgaccataatgacaaatagaaccatctatatatactatttattatatgactattagtgatttttatctctaacaataagaattaaaataaaaataaagtaaagaaaaacattccaaaaaagaatcactctcgttatttttagcaaaataatatcttaagaattgttaacaaacatcattttaagatttttatcctacgttcttttttcactttccgtgcttcttccatttcacgcattctcaccttatagattgattgctctgaaaaaacttgtacacaaatgcgcttagaataaaaaataaagcagctattagcaatataaaaggtctatttttaattatctcttttagataatattagatattaaaataactcagtttaagaaagtctaaattagatatattaaaaatacattcagatattattaaataaataaacaaaaggtgtattatataatattgctttgttatttatcctctaaaaaggaataatgatatgaaaaaattattacttagccttactatgctggcgataatatctacgccagtgttggctaaatcccctgtagctaacttaaaaatcaacggtgatattaagccaccaacttgtactgttaatggggcgacacagcgtgatgttatttttgattacggagtcataagcccaacacttatccctcaatcgactgtctactcttattctgacattggagttcaaaatacagttacgattgaatgtgatgcaaaaacatatttaacatttactgcatctgacacttatgctgatacagaattaagtgttaataatacatcaggctggtttcatttagttgataaagcaaatcctgaaaccgcggttggtgcggctttcttcgcatgggataatgtgactgtcgatagcaaacctgcgtatatttcacgagcaaacgatgtgtctattacaggaaccagctacaataacgccctatacaaagggccaaccaatggttggacatcagaaaaacaaacaagcgttgataaaaacgccctggctctaatttcaggtgaaattttccaagcaagttttagacaaggaatgacaatgagtacttttattttatctagagatgaattaagtaaaaaaggaatagatttatctaatggtttagattttatgggagaagctgttctcacttttaactttggtgtctaattttaaagtaattgataatcacaatatcattaatttttatattgtgattatcttttacgttaaaaatttaacagtacttaacagtacttagcgcgctatcaatgttctgaatatcaaattagtacatcattcaatcaggaacgatacatcaatacttcctttataagtattcgtaggtatatttccattggcacaaaggttgaatgataatgacttataaacagttcccccattatattttcccaaagattgtcctgcataaaactctaaggcctcggcagaattgttattacatactgcattagttatttttttagctgcatcagataccgtgatataaggtgcgacttctttatctttcaaagggatattgggagacattgtcatccccgttttacttgcattgactagctcattatagggttttaatgtcacgtacatatttcctgaatgagggcaagagacaagcatactagcgacactttgctcaagtaacttggctgacttaaaattttgtgctagttgagcggcaaattgtatatttgttgagctagcaggagaaacattacatgtttttaagacgtgaataggaccattaccaaatgaaaaaggaactgaagatagatctggattagccccgcctgaggttgctgtttgagctgtagtaaaatatattggagctacaaaatcgtaaataccgggtttaacatggcctactgcataaatagaataagagcttattctcaagctagtattacttacacgtgataaattaccataccagcacattgggtgacgatagacaaattgattagaatattcctctgttctagaaatttcttttcctcgacgcagggtaattcttgtcggggaaggtaatccattctgataatacaacgcatcgatagatactattccattgatagctgcaactaaataattttccctattttcctcttcacttacgtttttattatataattttaatccgtactccccctcttgacttcctgggaatgggaataaaaaattctgccattgcgcactgtttttactacaataatctacaacattattaacacctacagccgctccatagtaattaccactactacgaagtgacatatatgattgaggaggcgttaattcacctatataccccgttccattatctggaataacaagtgcttttgttaggagagggaaaaacagtgacaaaacaaaaagactgattttaatagttatcgttttcaattttcaccaccaagcataatgacagatagaaccatctatatattatttattatatgattattattgatttttatctctaacaataagaataaaaatcattattccatataaaaactaaaataaaaacaaagtaaagaaaagcattctaaaaaagaatcattcccgctatttttagtaagataatattttcaataactgttaacaaacatcattttaagattttctcctgcgttcttttttcactttctatgcttattccatttcacgtattctcaccttatagcttgattgctctgacaataatctgcacacaaatgcacttgaaaaaaaataaaatagctattagcgatataaaaggtctatttttaattatctcttttagataatattagacattaaaataaactcagtttaagaaagtctaaattagatatattaaaaatatattcagatatcattaaataaataaacaaaaggtgtaatatataatattgctttgttatttatcctctaaaaaggaataatgatatgaaaaaattattacttagccttactatgctggcgataatatctacgccagtgttggctaaatcccctgtagctaacttaaaaatcaacggtgatattaagcccccaacttgtactattaatggagcaacacaaagtgatgtaattttcgattacggagtcataagcccaacacttatccctcaatcgaaaatttattcttatcctgccagtatggttcaaaatacagttacagttgaatgtgatgcaaaaacatatttaacctttgttgcgtctgatacttatgataatacagaattaagcgttaataatacgtcagactggtttcatttagtagataaagcaaatcctgaaactgcggttggagcagcttattttgtatgggataatgtgactgttgatggcaaacctgcgtatatttcacgagcaaacgatgctgctatcacagggactaactactataatgtcctatataaagggccaaccaatggttggacatcaaaacaacagacagaatcggttgataaaggctctctggctctaatttcaggtgaaattttccaagcaaatttcagacagggaattgaaagtaatcctactcaaacctttattttatctagagatgaattaagtaaaaaaggaatagatttatctaatggtttagattttatcggggaggctgttctcacttttaattttggtgtctaattttaaagtaattgataatcacaatataattaaaatttatattgtgattatcttttgctatcaataagaacccctcaaaatttaatataattaaggacttctcatataacataaaattatttttgtatttcttttaaataatcagcaacacgatattcaatatttttacgctcaatgtcagataaagaataaaacatagcgacattattcacatcataatttaatagtaaaccataataatatgcttctttcacatcacctttgagtagaagtgcttcataaagtttgtcaaaagaagatattgcaaaattcatttttcctaatcgaatattcatatctaaaatataatcgttatgattttttagtgtagataaatacacattcacgaaaggatccttacttatgtattttggtgcattagtatacatattatttaattcagaatacaaaaaatcatttatttcatatggataatctaacgataattgataccactcaatagccttatcaaggtttcgttcaactaaacacggtgactctaaataataatcagcaatgatactaatactagaatatttgtattcattagaagagctgtatttactaggttcttctcctgttgttagccattctttaagatagtagtctgctttattgatattatctttatcttcacagatattttgcatatagtaccaataaattaactcagccgcttctttatttcctaaatcatatgcttttttggcataaattaaacttcttccactatcttcaatactataaaatcttgctaattctagttgttgtttactactctctttttggtttagtaaataatcaagtgtattatctcttttttccttccatcttctatctatttcatatttttctgattctaattcaaagttagacgaattgatgctaatacgtcgttcatattcagatgctttagcaatgttctttctaaccccctctttaccgtctcgataaattatagccaattcttttaagcaaataaaatcacctaaatctgcacattttcttcgccaagccaaacgctccttaatagtgatattagttaacttatcaaaagaatagtcttgataaatttcatcgcgagcattcttatctttatactcttttgtaataataaatttaattgcatcaatagaacctatttcagctaatttaaatatatccttataatatttttttaaattatcttcattaatattgttagctgagttctcatgtattatattctttattgtatattgaaatgcaagatttgtattttgacttaataatggttgaatagcctttcttattttatcatcatatagcgaacgttccacaataaaatcaattacatactgtgaatccattccatatcggaaaagaatactatatccttcctgtcgttttttttctgtcaaccttctgctttctaaatcatctttcaattctgaaacaatattaataagagcttgatcatctattatatttttatatttaatagtcgcaattgcttgatgaaaagtagcttcataggcataacctcgtgctttttgatataatgaaaaagcatattcttcattattggcgacatcttcttctaaaagaagatctgcataaaaatgagctaagctatagttttgattaaatgtaccagctgatttatttttaattacactctctcttaaaatattcacaatctcttcttttttaagataatcagaagcaccaaaatcaaaatatatttttactaattctctttggcttttacctgtcaatttatcattagttatgttttcttgcagaaaactaactgcttttctaatattctgatgaaccctctcactattagaatataatttagccaataataatttactttcaggagatggctgtatgttatatgctctctctaccagcttaagtgctttttcaaaattataaaaactactatttggttttaaatagacattagcgagcgctagcatggcttgtggagagtttggatatttcaataataatgtattaatatatttttcaagcaagtttctaaaataatttgatgataatgtatcactattatttaatttctctattattttaattaatccatcatgatgcgctaaatcagcagatttttttaaatatatattagctaaaaaagaattttcttgaaggggatagtttttcttatcacccttgtagatttgatacagaagatatgttgcctcaggatagttcaaatatgctgaatcaaaaagtaagttaatatcttgacttattaacttatattttaaatacatcattttaggatctttttcttcaataaaaggacgtatcatatttttagtctttcttgattgttttactgaatccttattctctaaatattgatatacagcttctttattgccttcttctgctaatttttctaattcttcaagtgttctttttttttcagaccaagattgctcaccataaatagggagtagcgtatattctttttaatcataataaatcacaggaaaattaaggtcatgtaaaaaatctttcgctattgaagagcctaaatcagcagctttagttaatgacgttaatccttgagcatcatcagtaggactttggattaatcctttgttacgtaaatatcctaaattataaagtgcatttttattttgtaaatttgctgattttattaaccatttttgtgaagctaaggcatttttatcaacccctatgccatcccaatacatcattgctaaactaaatgctgcttgcggatcactttccgcatgttgtgaaaaataattaaacgcctctttatagtcacctttttgataatagctataaccatttggctttgactgtggttggatttgatttttattgagataaaaccccaaggccataaatactaaaaaaatggagataagtatatttttaattttacgagacataatattccttttaaagctcattctttttatataaatatagcacaatagtaaaaattaaaatcaatataattgctattcttttatttatatttttatattaatttatttagatttgctataaaaattgattgacattcaatactccactctataatcagccctcgttgtgtcgtattattcagcagcttgggtagccaagggattttgttagtcctcaataaaaaactaatagaggtcagcgattgttatggacattaatcaagatattagacgtttaggtgaaaatctgaaagggcgtttggcgcctgatattgttgattttgacttagaatatatagaccactcagaaagtattttagcttttgaaacgttatgcgatcacatagctgactatgatgtcgtaataaccagtgatgagtataagcagatcattggtattgtaaataagctaaatcttgagttagatgatagatatttatatataaatccagataatattaagtgaattagggtcaatgaaaagatcctagttcaatactaggatcttttgtatttatctcatcccttcagccacttaccgataatagtgagttgtgggctggggttgggtttaccgttgttcggtaagtaacccactgtatagtgtctggttttaccccccctcttctttagctgtctagctttttgccttacaactgcgcactaatgccaaccatcgaaaagcgaaacccacaccgacagccaccagtcgcaaggcagtaccttatttaccgatatgaagaccgcagactgagtaatagaaatggtatagctgcaaatcaagataaaatatctacttttatggttgaaagcgatactcgaatagtccttaatcatggttcgtctacaaatataaatagagttatctataaagaacaaatattaataaataattaacttaccatcatcaaaacaataacaatttaatttttaaaattactctacacttactctaaaaaagataaaaattatttttatctttagtaatatctatgataattggatagctacagtttaaaaatagaataaatataaaataacaatcactttaagaatatcttaattagataaattaaaaatatatcaatttgtaattaaataaaattatagattgtgtattatagagtattatttatatttttaaatttataaaaaggaatggctatatgaaaaaattgctatttagtcttgctacgctgattgtaatgtcaacaccagcattagctactccaccaggcgctaacttaaaaataaacggtgatattactccccctacttgcaccgttaatgctggtgataatgatattattattgattatggtgtaatatccccctcttttattcctgctgaggaaaattacgcactaggagctaagagtgccaatatcaaaatatcctgtgacgcaagcaattatttaacacttaaggtatcagatacttataaaacaagttcaacagattcagcgaaaattagcgtttttggattagttaatgcaaaaaatacagaacaagagattggtggatatataattgatgtcattgatatcaaagttgataataaacgagcttatttaggaagagtggcagataagatttggactggatcgtctgcaactatttttaaagataccttaacagcgttaactagtgaacctcaagcccaggttgataaaaacaatttaaaacttatagctggaaaagtgtttaatgcaaaaatacaaataggagcttataacgaaagtaggtatgcgtatattttatcaagaaaaaaattggcacaaaacaatatcgatttaactgatggaattgattatataggtgaagctgtttttacttttaactttggtgtctaaatttcaaaatcattgataatcacaatataaatatatgttaatttttattgtgattatcttgtgttatcaacttatctataatgctgtgtactgatcgtgctgatacctaaaaaccgccaatcaacccttcagctaaacttaatcacatgccaataagagagtaattactataacgataacaaaaaaagaatccccctctttcgtcaaaagcgtgaggaaatatctctattttcgttaatccaaactctgcactctaactatttttattaatataaattatcagtattaatacttaaaatatgacacaacaaccaaaaataattaactttaaaaaatatcttttagcgaattattttcaataaaaacaaaacacaaacatatctatatatcacatcaataaaaataagccttccccttaaagttagagactaaatagctataataatcaactatattatttaattactgctacgattattttagtaataaaaacgcctaattgtgatagtgattggaagaaataataagaaagttatctatactaaactaatatcaaattttaagtatcaaaatattaaaggagtttgacgaaatgatacgatgtgttcgcttatggaccggagaagatggtaactctttatttgaagaaggtatcatcgaatttaaggatagttcacgaggcgatagtgaaagtttgccaattgctgtttcagagttatcgtttagagaaacaacttcaggtggttcatatgattggcatcaagatcccgttcctcgttatgttattacgttatcaggaacattagagtttgaaacaaaagatggctcaacttttatcattaaacccggtgatgtgttgttagcgcaagataacagtggcactggtcataaatggcgtcttatggatgatgaaccttggcgacgagcttatgttgtttacaaagaagatgcaggattatgttttaaaccgaccaaaacaactaagtaattggggtctgtatgaataaaactattagtgaacatgtagatgtcgcgctcattggtgctggcattatgagtgcaacacttggcacacttcttaaagaactagagtctaatttaaaagtcgcgatgtttgaaagacttaatgattgtggtcaagaaagctctaactcatggaataacgcgggaacaggacatgctgctaactgtgagctaaattatacgccaccaaatcctgacggcaccgttaatatcagtaaagcgttagaagtgaacaccgagttcgatttatcgcgccaattatggtcttatttagtaacaaaaggaaaaattgccgatccgcgtgattttattcatgcttgccctcatatgagttttgtttggggtgcagataacgttaaattccttcatcaacgctatcgccaaatgtctgccaatcactgttatgaaaatatgcaatacagtgaagacaaacagcaaattgaagattgggcgccattaattatggaagggcgtgatccgaatcaacagcttgctgtcacccgagtagctactggtactgatgtcgattatggcgcattaacacatctattagttaagcaactttctcaacaagataattttgagttgcactataaacatgatgttattgatatcaaaagaaatgagactggcggttggaatatcgaagttaaagatctcaccacccatgataaatacctaattacagctaaatatgtatttgttggtgccggtggacgcgctatcgatttactccaaaaatcaggtattccagaaggtaaaggctacggtggtttccctgttagtggtatttggctgcgttgtgatgaagataaaatcagctctcgccatcatgccaaagtttatggaaaagcagatgtaggctcaccaccgatgtctgtcccccatcttgatactcgtattattgcaggtaaacgctccctactctttggcccttatgctggtttttcaagtaaatttttaaaacacggctcctatttagatttatttgagtcaattcgccccagcaatattgaacctatgctagatgtcgcgaaagataactggtcattaactgaatatttaattggtcaagtattacaaacgtcagcacatcaatttgaaatgcttaaacagttctatcctcaggctcaacatgaggattggcaagaagctgttgcaggtcaacgagtgcagattattaaacccgcagctaaacatcatggcgtattagagtttggtactgagctaattagtagcgcagataaatcattttcagtgttattgggggcatcacctggcgcttctacagcagcatttattgccatcaatatcattaaatcttgctttaaacagcaacttgaaaatgagggttgggaagatcgtcttaaaacgattattccaacttatggtattgatctcaaaatagatgccgatgcttgtcgtaatattcgtgcatcaacggctaagatattaaaattagaaacaccttagttatatcttaccgataaaaataaaacagaccggaaattaaaggtctgttttattttttatttgcatcgttattattaattacccttttccaagtaaatatacttagaaaaattacatcatttctacaatagtgataccaccaataatagaaagtaatgaacatagcgtacttaataatacagtgcccgttgccatatcagcataggccttatttgtaatagctaaagcaggcaccgctgttgcagtaggcaatacaccaattagaaagacggcttttaataattcagtttctaatccaagtgcaaatcccgttcctaaaattaatgccccttgtacaacattctttattatcacattaaaaacaatttcagtattaactttgagtttgagccctgaaattaatagtcctaagaaaaataatgctacaccaccagatgttttccctatttcattcactgagttttgtaaaatctctggtagcttaacgccgaaaatagctagcatagcccccaaaataggcaggaaaactaatggctgagagatagcattaagcaatgactgtaaaatgctttttccttgtttggcaccactaatgatcatgatagtaaaaggtaaaataattaccgtgtagatcaaatttcccaccaccatagcaatcaaaccagatgagccgactgttgccagtaatactggtggtccacaataagccatatcaggaaatgaaaccgataatgcctgcattgctgagttctttttatcatgtttaaaaaagaacttgccgcctaaaaaaccaataagataagaaacaattaatcctaccgcgagagctaatagatagtcgatattaaagaaaaccgacggagaagcttgggttgccgctaaaaagagtgaaaaaggcagagcaattttaacgacaaaatcagcaaaggcttgtgaatactctcttttaataaatccatatttaccggaaagccagccaactaaaagccctaagataatagggcccagcgctgctaaaatggtttgtagtaacatattacctctggttgcttaatatagtgtccccactttattcaatggctataactgataacaaaatagttatctattatatgaataaagtaaaaatattcgtattattacctagtaataaaaattagaacattttaattatcggatatatttaaaatcattcaaatgataaataacaatattacttcacaatgatcaacaggatactttatcgagtaaactaaacagggaagtaaaccaacacggcaattaggattttaagtatttttacttaaaataaacctaacaatggtaataaacagataataaaagaatagtttttgaataaaaaataaaataggtagcaataaattaaaccatatggaaatgattaatcgagcttattttaatatatatgacaatgctatattgcatttttcagcctaaggacactgtttaggcacatcatttagctgttgatgctgttgctcaaagagcacttttttcttatctgcttctttgattatttttaatatatagatactatcaaaatcaccactttcccatttaggaatagcttttggatcaccaccaaattgcgccataatatcccttactactttaactaaattatcatgctcccaagcaataaaaatgactgaattctgatattcttcactcagcagtttattacgtaatgggtctatctctttggcatggtaatttaaatggattggcagtgatgttttcaccgcaagaggtgttaaagtttgaagagagcgtaatgaatttccaagtttattttgttttggtgctgcagcaaataacgcatcaggctgaccaaattgtgttatcaatcgattaggtagtgctagcgcacgatttaatccctgacaacttaattgtccgctatcattatcaggcttttcaccatgacggataaataccagcgtttgttctgaataagccataagattaaatccatataaaatgaggctcaaaaagataatgatatagcgcatataacactccttttgagccgtttgatttttagccaaagattttggttagatgtgctttatattctacaatatctttctcaatattaggctctttaatgacgttgttggtcataaaagtaggcagctgagataaaccaagaaattgttgtgatttatgaaaagcaaaatagacaccatcaacccctcgcccatcaaagaaattaccaaattcattgaaagcttcaataggggcattccaagtcacggagatcatatattgcttaccttgcaacaatcccccgctaccatattgtttgcttggatcatgacgagtacgtccatcgttttcatatagtttgccgtgaccataagtatagacttcatccatatactttttcactttccatggcatcatcatccaccagcccggcatctgataaataatagtatcagcccagataaatttctctatctcttcattgatatcatagccttcttcaatttgtgtttcttttacctgatgccctaatgtcgccaaatgtgccagagcgatatcatgtaatgtacggtttaattgtcctgcagaatgcccaaatttttgtccaccgttaataagtagaatattcatatttactcctaattttcttactactaaatatttaatatgagctattttaacagaaaataaacggatgcacttcagggcaaaaaatcaccaaaaagaaacactacagtattaatcacttttatcgaaacagaataaaccaacaataagttaaaaatgctaaaaaagcagccattaatcactgtgtatttcaataaagtggattattgcttttatcgcaaaagtctattgtttattgtctactttattgcctaaattgagttaattaacgataacgctggtggatactagtgacttactcctagtttatttataaatcaaaaagtatgctcttactgattgttgtttaagatccttgtcagcataaacatctcaatattgtatgaaattgcgactcataatgaatcgctttttgatttaatcgctgttcaacactgctaatcacaatcaccatacagatgctttttatgaacaacatggctatttttcactctgagcataaaataacctcaaatgttaaatcctaaaacattgctaacataacttatgagattatttatcaacgataaagatttttatcagctgatcttgctttttatgggcgttattttcaatctctcggactttgtaagcgatcgtacttaacgcgatttcaaataaacaagcgtcaaagtctgtagaaaaaacaagcagcaaaaacagaataaacctgatagttaagtggcagaaattttcgctacttacacccgataacaaagaaataataataagcggaaaaacagataagtgagtgaaaatgatatgctgacaattttctagtgtatgtattatttcctctttgttaataccctaacaatagtcgttttagtcacaattaaaaatagagagtaataataagacatccctttttttggtatatatgacgattttttattaacaaaaaagcagatctcgatcactattttaactttagctatatttactagccgttcaatatttacagcatttttatctaatcacttgtttaaatattaattatcacactgatttgtaatacaaataatttacctattatactagtaatatcataatgtaacataaaaaagaacttcatcactgatagtaaagtgtcaactaaacaatttgtataatattatcttttctttatgaattttgaatgactaatatatctaacattaatcatattcttatttattggaacaaagtaatataaaataaattagcgtttattttttatcatctttattttccacaaaaaaataaataaaaaatcttaaaataaaaaaacttttaaaattaaaaataaaaagaattaatctctatataaatttaaaaataaaacattattatttattaattataatgaaagataaaatataaaaaataattaatatcaataatgaatatattaaatggtaacgcactttggtttataaaactgatttttacaacacagacaaaaaacattagaaaaatttatgattttatagacattgaatgagctggataccaatgaaaaaagctaagttaggctttaatgtatcgaacaagttaccagtataagtaataaaaaactctatttttactatcaaaaatcatcttgataacaataacaataaattaattacattgataaaagtcaaaaaacaagacaaatactaactagttagtaacaaaaatagattttttttatatttgtcacacaattgattttattctattacatctttctaaatttttcctacaatagcccacaacctaacctgacaatagtttaagtaacgaatgcttatattgtttctttaggtaactatctttttttctttatgatttatcgtttcagcaaaatagaaaaccatcaaactaagtgccctacacaaaacataaatgacgaatgaataggtttgccggtgcagtgataaacgataaaaaattgcaaacttaaggataaaaataattatgtcagactatctatcatttttactgggaattgttcctttagccgttctgatttttatgattttaaaaatgaaatcggccgttcatcacgctgtcctcgtttcgctaattatcactgtggctctcgctatttttcattggaataacacccttcaatttgcctctgtatctgtactttatggtgcggtaaaggggttatggccgattatcatcgttattctggcggctatttacagctataacctaatgctaaaaacagggggaatggaggtattaaaagacgtattagcggggatcagcgatgataaacgcgtacaagttttacttatctcttggtgttttggcggttttttagaagcagttgcaggttatggtacagcagttgctattcctatcggtattttaatcgcactaggttttgatccctttaaagcagccgtcgcttcactagtcgcaaatacggtacctaccgcatttggtgccgttggtattccagtgtctattttggcacaaaataccggccttgatgtattggtgttaagtaaaaccattattatccaacttggtttattcaatattctattaccttttgtcattgttgctattgctggtggtggtattaaagccattaaaggtgtcggctttattactttaatgtgtgggatcagcaccttaatccctcaatatattgtcgcagctaatttaggtgcggaattacctgcctttgcaggaagcctagtcagtctgattgtggttattttcttggctaaacgcatgaaaacaggccatgataaaagtaaacagccaacaaaacactcagctaaagagctattagtcgctagctctatctatctgtttacttttatttttatcttagcctgctctccgctattccctacaatccaaaccgcagtaggaactattgcaactaaaattccttttgtattaagtgatactcaaactgaatatcaaactattgcttggttaagtacgcctggggtattgattattttagcgagttttgttggtggcactattcaaggtgcaagcctttcaacgctcttttctgtattagtaaaaaccacaattcaattaaagaactccattattgccattatggctattgttgcgatggcaacggtaatggatttcagtggcatgattggtagcattgcggaaacattagttaactttactggcgctggatttatctttattgccccagtcattggtgcactaggaacgtttgtaaccggaagcgatacaaactctaacgtactatttggcaagcttcaaaccagtgcagcggcaaaactccatgttgatccctttattctcgcagcggctaatacctctggggcgactggcggtaagatgatttcaccacaaagcatcgcgatcgccgtttcggcgaccaaaatggatgggcaaagcagtgccattatgcgagaaacattaaaatattgtattgcctatatcatcatcctaggtgccaaaatcggcattatttatcacctaatgaattaactatacaagataagtggtggcttatcttggctatcacctatcgctttgacataacgaaaataaagaaaaataaccaataagaattttatcttaaataaaaatgacaacatctgagcgatgttttggagttcggtgaatgaaagttaatttttatgcaacctgtcttggtgatgtgctaaaagcagattcggcacgagataccgtattattgctcgaaaaattaggttgcgaagtattatttcaagagcgccagggttgctgtggtcagccagcacttaatagcggttatgttaatgatgcaaaacccgcaatgaaatcattaattgagacattagaagttaatgattatccgattatttcccctgcaggctcatgcacttatgcgattaaaggctatcccagctatcttgccgatgagcctcaatgggcgcagcgagcccaaggtgtggccgatcgtttaattgatcttaccagctttatcgtcaacaccttaggtgtggttgatgttggcgcccgccttgcgggtaaagcggtttatcatccctcttgtagtttaacgcgaaagttaggggttgttagtgaacctttaaccttattaaaacatgttgaaggactcgaaatgttacctttcgccaattcagaaacttgttgtggttttggcggcaccttctcagtaaaaatgtcagaaatttccggtgaaatggtcactgaaaaagtaaaacatatcatggaagtcagccctgattacgtcattggtgcagataccagttgtttaattaatattcaaggccgtttaagtcgtgaaaagcgtcctgtcaaagtgctgcatattgcacaagttttaatgagtcaataagggggctgcaatgtctattaaaaccagtaatatcgattttagaccacgcttagcgcatgaaatgaatgataccattatgcgtaacgccgttgttatggcacaagagcgcattggagccaatcgccaaataatggtaaaagagttaggtgattgggaagcgtggcgtgatcgtgcagaacaaatccgtaaccatgttcttgaaaacttagacgcttatctttatcaattatcagaaaaagtgactgaaaatggcggtcatgtctattttgccaaaacagcagaagatgcgacacgctatatttgtaacgttgccaaacagaaaaatgccaagaaaatcgtcaaatcaaaatcgatggtaaccgaagaaatcggtatgaacaaagccttacaaaatgaaggtattgagattatcgaaaccgaccttggtgaatatattctgcaactggataacgatcccccttctcatattgttgtgccggcgatccataaagatcgctaccaaatacgtaaagtactaaatgaaaaactaggttatcaaggtagtgaaacccctgaagatatgaccctttttatcaggcaacgtattcgacaagattttctttctgctgatattggagtcacaggttgtaactttgcggttgcagaaacgggctctgtctgtttagtaactaacgaaggtaatgcacggatgacgaccacattacctaaaacccatattgccgttatggggatggaacgtgttgcgcctacttttgaagaagtcgatccactgatcacgatgttatgtcgtagtgcggttggctcacgcctaaccagttataacacttgggtaactggacctcgtgaagcgggtaatgttgatggccctgaagaatttcatttagtgattgtcgataatggtcgctctgaaattttaggctcacaatttaaagatattctacgctgtatccgttgtggagcctgtctaaacacctgtcctgcttatcgtaatatcggtggtcatgcttatggctctatttatcccggccctatcggtgcggttatttcgccactcttaggaggctataaagattttcatgacttaccttacgcctgctcattatgcaatgcatgtaatgtggtctgtccggtcaaaatccctttagcacaattgatccttaaacatcgtcgagtcatggcggaaagtggtttaacaccaaaagctgagcgtcgtgtaaccggtatgtttaattacattaatgcgcaccccacgctttggaaagttggcatgaatgtaggggctaagatggcgggcttgatgatcaaaaatggctcaactccaatcaagataagtgtactcaatgattggatggcatcacgtgatctcccaaaacccgatggttatagtttccgtagttggtttaagcgccacaaagcagaaggaaaaaaataatatgttaaacgaacaaaatcgtgctgagtttctgcaaactattgctcaaaaattaggacgtgaggtgacgcatacgccaaaaccacaagatccccctattaataatttagctaaaacacgcttaacaaatttaacccaagatgaattatgcaaagaatttactgattttgcacaaacccagcaagtaagatgcgttatcactaaaccagaacaagtgataaatagcttaatagcgctttgtgaaagctatgattgtcaaggttcagtgataataagtggtgatgagcgcttaaatgcacttggtgtaacacaagctattagtgaaaaatatgaaacttatatttgggatcctaaactcggtcatgaaaatattattcatgctgagcgctctcaaatagggattgtctttgcggaagcgggattaacagaatctggcgggattgtgctgttttcttctccggaaaaagggcgttctgtcagcctgttacctgaaacctcgattgttattttacgcaaaagtgacattttaccgcgagtggctcaacttgcagagcgtttacacaaaatggcacaagatgggatcagaatgccttcatgtatcaatttaattggtggtgcaagctcaacggctgatattgaattaatcaaagtatggggagttcatggtccagttcatgccgcttatcttattattgaagattgttagtttaaacgaaacaatataaaaacgataaccaaataacttaacgtcatggtcaacggattgacccaaatacaaaacaccttttatacaggtgttttgtatttatggcttaattagtgagtaataatttagctcgccattgatttaattttatttcacaagccagcagtacttcatcagcaccattgccccccatcattaaagcagattgacgttggcattcactacttctaaaaagaataaactgctcttgtgaactgactaatgcatcaatagcacttttagccgcgatagagtcactatcttcaaggtcgcctttgcttttattatagataacattcaactgctcttcagataatcttagttcatctaatagacaagctttaatggttgtttggcttgcatctgttgacaactcataacatttggtcaggggatcgtgatttacttgagcaaaggaggaaaaagagatcaaactcattgtgagtaaactgtaagaaattaaaagcgtacctatcttcacgttggctcccaataataaattttttactaaatttgactgtcaaatataaggtattaaagaattaacaccacatctattagtgcgaaaacacaaatttaggatatgtcgcattaagtgtagaaaataaatcttaataagaagtaaaactataattaataagtctttaaatctatctattttattagtattttttataaaaaaagtgttttaataataatcttagtaagcgttatatttatctattgagaggataatatacaaaacatcaggtttagtgtttttttctcgatttaagtcaattttttttgatcctccgaagttctatttttagcaatagaagcaaaaaaatagactttttttacttgatgtcaatagccaaacaaagcgttttgcagtaatctcatcgctgattttttgctactttcaccctttaaaacctctggtggtatgacaaatatgttgtataaatttacccccattattctgctgataatttccaatatctttatgacttttgcttggtatggccatttaaagtacggtaacaagccgttaattatagtgatcttactcagttggttaatcgcttttgttgaatactgttttgcagttcctgcaaaccgtatcggccacaactattacagcgcagccgaattaaaaaccattcaagaagtcatcacactaaccatttttgctgttttttcggtgacttatttaggtgaaagtttcacacttaaccactttatcggttttattttaattggtgcgggtgcgctatttatttttaaggggccattttaaagaataaaaaatagctgctgataaaataaatgaaaattttcaaaacctcatttcgaaatgaggttttttgttttgtagagcctcgtatcagtcgaacaaaaaacaatcaaaataattgattgctattattaagtactaaccagtaattcatagcaagattaagttatatcattcaataaattaccacatcccatattatgcactgcattagtagaaatttgactacaaaaagcaaatattgctcttgaaaaaatattttcattcagcgcataatagctagctaagagaggcattgtttctctttctttctttgttgcttctcttaagtgaaaacgattttcaaaaacttcttatattactttaaggtcagataaaacggtatctggtatgagcaaacattctaacgattttatttatatgcaggataatccctgtatgcattgtggtgcatgttgcgcctattttagagtctctttctattgggctgaaatgaaaagtggtggtggtgttgttcctgacgaatttaccgaacccttaaccccttttctatcatgtatgaaaggaactaatgagaaacaaccacgctgtgaaaaattgattggtgaagttggtgaatgcgtgagttgtgcaatttatgaacagagaccatccccttgccgtgagtttgaacaatcttgggctaatggcgtaaaaaatgaagcttgcgatcgggcaagagccgcttttgggcttcctcctcttcctaatatttctctaccgcattctgcgtagaacatcagaggggctagcccctcctgagtctctttgatcacaattttgcacttctttgcacaaaataaagaattttcactaaaaatagcattataaaataataggttagtttgactttatttataaatcatctagtatagagagtaatcaattaataacgtgtatttagtgaggttttttatttaaaaatagcaataaattaggaggtcactatgatcagtagctcatttttcattcttttcctttcccttatttgttccgttgccgttgtcagtatgttactcggtggcttagaggactaattatgaatatttctgatgaaaatattctcccccagaaatagacgcccataccaaaataattatttttagtatgggcgtctattaatattatattaattaactttctttttattttgctattactcgttattagtaaatatttttatattctatttaaatctaattttaataactgtaatgaccggttattttccacgaaaataaaacatcttcagcgacttgtccaaaaccaatattatgcatcactaaatagcgctgattatcactgcttttcttgtctatgacgagaccaatatgaggacgtccattatctaagcgccagctaacaatatcaccaggcaagtagtctgacgcctctttgctaataggtttcacctttcccttgcgcgagaaaaaaacttccaaattgggtactctgcggtgatcaatattagtatcaggtcgactaagtccccagatacgtttacttgggtaaagtgcaaaattggctttgatatcttcatgtaacaatttttgtaaatcaatgccaattcctcggtaactacgaataatcacatcactacacaccccataatgagcaggcacatcaccattaggataattaattttacggtaggctggatcataaataacggctctaggtagatccgttgcataagccaccagctgtttattttgtgtcggtgttatcgcttgggaaacagaaatgggtaagataatcagagagataaagctaaatatgaatattttcaaagaattatttccatgttgtatcaatcgatgataattaaaatcatctttatttaatgactttatcatttgctaaatagtggggtaaaaatatgagaaggatcttaattaaccatgacgcatcaataaaaaaaaccgagttactcttaaaagcaactcggttgatatcaaagaatgaaagtgtttaacgcaattagttaagcacaatatggcttttgcgtcgtaaactggcaaataacatatatacagctgtcactaataacacgacaaagaaaaagttcataatgccgttacttgcttgtgacataaacataccagcgcctaatggccccattgctgaacccacgctgtaacttaatagcatcacctgagtaattgccacaatatagctcgcattaacatgatcacaagctaatgtgatagcaataggataaagtgcaaaagatgacattcctaataaagctaatgcaataattaacaccacatagtcattagacagataagtcatgcccatcgcaaataccccaactaagcacatcatggctaataatagggttttactcatcatcaccgacaatttgctaataataggctgaacaaccataccacctaaaataattgctgccatcaacaccccaatttggtcggtgttaaattgcccttgatttaaagccaatggcatcatgccataaatactccccatcacaacgccagaaaccatacagcctactaaagaagctttattcagccggctaatctgtttaagtgacaaacttttatgctcgtggcattggggttgtccttgtttaaaaaacaaaggaggtaacactgcaattaatagcaatgccaataccgcaataaaaggaattgccccttgcgtaccaatggcaccaatagcaagctgacctaatgttgtgccaccataaagtgatgtcatataaaagcccaagcgtttagctcgctctttaggattatcaccaattaataaccatgattcgactacaacaaagatacccgcaaccgccataccaccgaaaaagcgagatactagccataccgataaataaggtaacagtggcaaaatactcacggtgaatgctaacaacaataaaaacagcacaaaagagagcctatgccctatttttgcaataataggttcgatcatcactgaacctatgagtaatccaataaagtaaatgcttgctaaccagctagcataaaaagtatcaataccaaaactatccatagatagtggaattaaactcattaaatagcctgatgcgatagcaaataccgttaaacccgcgacaggtactaatgtactgtcacctttgcgtaccaaagtagtgttctgtttcactaccctcgtctccacaatcaaaacggttaatcatgcgctgttttctcgaagccagacattggcactcctttcatctagaaaagatgaaagcaatagtgatgaaaacagtgggtggcgtccctaagttaggggtgcgtgaatatagctcgttactaaaaataaataaaattataaaatctaatgctagcgagtaattttatttatcctatccgttattatcgtcctttcacggtaaaaaagtagtccttgacgcaaattattttttaaaattgagaataatctatagtctttgtgataacagcgcacagagcagaatagcggctattttattaaataaaacagccgttaataacaacgcttattctgtactttgttctaaagcggttttgattgcatcagggattgaactgccatgtcctttccccgtaaagaggtaaaattggcatgttttgccggcatcagtaagataatcacagagttgtcgaggagtaagccagctactacgcgtttgatagcgcaagcgttgctcttcgctcatttgagaaaaatcaggggtttcttctaattcacctaatgtaattgtcaccgcaacattattggggatctgttgccatttatcttgagtgatccactcaccttttccccaccaaagagatgtgctagcggcaatatagcgttgaaaagcgtctggatgattaaataatacatatagcgtaaacacgccaccaaaggagtgtccaaacagtgattgctcagtaatagtgatgttttcttgtgccgtctgtgctagtacatagggttttaattggcttaccataaactgataaaactgttcaacattaccgcctttggcaaaggcttcgccatgtactcttggggtatagtcgtgagttctttccgctataaaataggccttttcacctacatagcctaggcttgcaataacaggcaatggctttttcgcttgcgctagtgcttcattcacaataagtggaaattgtgcatttccatcaacactatacagcactgttgtcttaggcgtatttttggggatcgcaagaaaaaagcgatactgctttccttgatgctcaacctctttttccataatgtgataataggttgatacttgtggtgtgagttgaggaacttgttgattaggtcttgcttgcacaatagaagataacattatcattccacataacattagtattctcatcaatcagatactctgtaagttattatcaaatgatggcagtaagccccataataaatgaggcttacctttattgagatagattaaaaactatatttgatatttgcccaataacgacggccttcatcaacgacccagttcccccctttatcgttgaccgcaggacccgtttcatcagtaatattcaatacggctaaatttagcatggtatttttattaaagttataggtcattcctaaatcaaaggttgtataaccactacgataacgagcgccagtataaccatttcgttgagccgcccaaatttgcttaccagtataggcagtattggcatagaaactggtagcttcatcgtattgccaatcaacacgcgcattggcgctatgttttggtgtcatatccaatggataaccttttaatgattcaccagagcctaatttttcgtcatcacttttacgcttagagttgatataagtgtaattagcacttactcgccaattatcagcgacagggaatgcaaccgcggtttcaatccctttaatattagctttacccacattatcatattggtacagttttaatccggtaataggatcgatttcacccgtatcgtagttggtaagcttatctttaaattctgtattaaagaaggtcacattggcggtaaaaccatcaccattgtcataaccaacaccaatttcttggctaaccgaagtttcaggttttaagtcacgattaccatacataatcgctcgccctttttccgttgatgtaccatattgagggctaatttctcgtaaactcggggctttaaaggccttagcaatccctcctttgatggtaaattcgtcggttaaatggtaaaccgcgtatgctcttgggttccagtgcttaccatagtattcatgatcatcaagacgtattcccccagttagggctaaattatctgtgacactaaattcatcttctaaaaataacgctttttgatcagcggtgatcgtagattgtttgacctctttaccaccgactgaagattcgtcttttaaacgtgcatattggtattgaccaccaaaagtcatcacattatcaggaaggaatgcggtaaatttagcatcgaaaacagtattagtgatttcagggcggcgatcttcataatatttgtagctatttcctgtcgctttatctacaccttccgtcttttgaacacgcttggtttgctcttgataaacacttaactcagagtgcaaaatatcaaactgatttttataagttaatgcccaatggttacggtcattattcgtttctaacattttgtttttatcaagacgtccaccacgattggtaaattcgctcatcgatttacccggtgttgtcgtgcgttgtagcgaattgcgcccagcttctaataaaatggtttggttatctgtaggagtaaaggctaatttggccgtaatatttttattatcgttacgcccttgcccatacgtaattttatcttctgcacgtaagtagctactaccataaagttgtaaacctaatttatcttcaattaatgggcctgaaagataaaaatcaccattgatagaatctcccgcgtcacggttatgttgcaatgttccccccatggaaactgcaccatgccactctttagtaacaggcttagtaataatattaatcacaccgcccatcgcatctgagccataaagtgatgacattggcccacgtattacctcgatccgttcaatggcatccgcaggaggaataaatccaccttcatatccaccactcccattagggcgtgattcacgactattttgacgtctgccatcaaccaaaatcagtgtgtattctccgggtaagccacgaatagtaatttcttgtttatttgcattaccattcacactgacgccttcaaccccttttacggcatcagcaagatcgtgtatcggttttttctctaattgttctttgttgattaccgtaatgctagcgggtgcatctgtttgttgctgtgcaaaccctgaggctgatacaactaatcgttctactttatcttcttgtgcatgtagtgaataagaagtcattaaaatacaggctgttaaagcacttattttaaatttcataacaaatccctgaagtcaaataatggttatagtaatgagaatgattaatattatcttaatcaattgactgtgagaataattttcttttgcaatttagtgatattttttaatctgcatcaaagcaatttagagcaacaaagataagaagatttgaataggcattgaagtgacaaaaaaagcagagctattggctctgcttttttttgtaatacattgataaataaaattaattactaattaccaaaatacagcataaagcacacagaggatgatcataatgatataagaagcaatattgaacccactttgggttttaaatgttgcatcagttaatacaatcgcccctacgctatcatcacttttcgttgaggttaagctgaccaaaccaataacaaccgcggtgaaaataaaggtatacatcatttggtcaaggaatggcattcctagtggcattaattttaggaataaagcaaaaggaattgagagtacaacccctataattgcccctttggcattagttttcttccaaaatagtcctaacaagaatacagctaagataccaggactcactaaacctgtgtactcttggatatattggaatgcctgatcaatgccccctaacagtggcgcaataaagcaagcaataatcaatgcaatcaccgcactaatacgtcccacattaactaagcgggtttctgaggattttggcccaatatattctttataaatatccatcgtgaaaatagtcgcgatagagttaagcatggaagctaaagaagaaacgatagctgctgccagtgctgcaaacacaacccctttagccccaataggtaagaattgtgttaaccaaggataggctttatccgcttgcgctaaggttgggatatgctcctgtgccattgttcctaatcctgccatcagcgtaggatcggttgtgataacaaaagctgcgatccccggcacaacaactaaaataggcacaatcagttttaagaaagcggcaaacactaaacctttttgcgcttcattaatagatttagcagctaaagcacgctgaataatgtattggttaaagccccagtaatagaggttagcaacccatagcccaccgattagcacagcaattcctggcaaattcataaattgtgggttttcttttgctaagatcattttaaagtgatctggcgcggcggctgtcatcttacttaagccttccattattcctccatcaccaccgatatagctaacagcaagtacggtcgtgaaaagtccaccgaggatcaggaagaaaacttgtacaacatccgtccatgcaaccgctgaaagtccaccgtaaagcgagtagataaccgcaaatagtgccagaccaataatggcatacatcatcggcacaccaagaatggtttctaacgccaatgatcctaaatacaatacagatgttaagttaacgaaaataaagagtgctaaccagaatacggcgaggatcgtctttaaattacgacttttaaaacgattctcaacaaattcaggaatggtataaatgcctttttcaataaaaataggtaaaaagtatttagcaacaatgattaacgtcaatgctgccatccattcataagatgcaatagcaagacctatcgaaaatcctgagccagacataccaatgaattgctcagctgagatattagcagcaataagagaagaaccaatcgcccaccaaggcagtgttttacccgcgaggaagtaatcctttgttccttttttagctccatcttttgaacgagaaacccataatccaaggctaataataatgatgacatagagggcaaagattgcataatctattgtgcttaatccaacaccttctgtatgcataatattttcctttcagacccatagagagaagagaatattaatgtaaacgtttccacttgctttttccgttactccgttcacaattttatcgcctatgttaaaaatcggatcgataaagcacataacaaacgattaccttaactaataaatcaacaaaattcgctgatttcactttatgctcttttaattgagaaaaaagtcatcgctaaaaataaacaaaatagagagagtttgataacggttacaataaataaccagataataataagaatatttttaagcgataaaacagataaaaaaggcgcttaaacaaactgttataaacttctgagcctattatcagaagtttgtaacatgtttaaagtataatggatgattaagaaaggtggcttaaattataaacggagttgcgctgaaccagagtgggtgagtaaatacgctgcttttgggttaggacttccccttgagaaagctttaacgctaatgttgctgcttgctctgccatcatatgtatcggataacgcaccgttgttagccgaggatgaatataacgagcaataagtacatcatcaaagccaatcactgaaattttttcaggaacagggatctcattttcatcaagcaccgataatgcccctgcagccataaagtcgttataggtgaccactgctgtaaaatctatcgacttggttaatagacgcatcatcgcttgctctcccccttcgccttctggctcgccatattcaacatagctttcaggcaaactaatattataagccgctaaagcagctttatatcccgcaagcctttggctggtatcttcaatatggtgagtggatgagatataggcgatttgagtatggccttggcgaataaggtgttcggtagcaatccatgcccctttatagttatctaaggcgacacaacgttccgcaatttctgggataaaacggttaattaataccatgctattaacttcattggcataagctaacaactcttcatcagaaagtgccttagagtggatcactaaaccatcacaacggctgttgatcaagagttcaatagattggcgttcatcttgcgcatcatggtaaccattacacaccagaatatgttttcccgcttttctggcgatattatcgaccgctttgaccaaggtcccaaaaaagggatcggatacgtcatgcaccaaaacacctaatgtttgggtactttgactgaccagcgctcgcgcagcagcattggggcgataacctaatttttgcattgccgaattgacaatctctatcgatgctcggctcgcttttggtgagttattaatgacccgagataccgtagcaacagaaacacccgcttcttttgccacatccttgatagttgccatatccacctcataaataactcttattctgcattaaaaaccttgtgtcattaatcgatggctaagaaaaagagtaagttataaaacaagtggcatgattatcagtgaagataagaaatttaaaaagtaaaatgatcaaataaacagtaaaaaaggaaagcgtttacactttcctttatctattactgataaaatttatatattgtttggctatgccacggagtatttgcagctaaaataccttggttctcaccccattcaggatgattcggcccatcaggaaaatattgtgtctctaaagccagccccgaataattaccataacgacgagtttttcctttactctgtgccaaaaaatttcctgtataaaactgtatagaaggcatggtagtaaaaacatccattttaagctcaccttcaggggcaataactgtggcaatcgatgctttatctgctattttttgtttgtctaaaataaacgcatgatcatagccattagcggctttttgacattcatctcgcataaaatcgatgccaatacgttttaattgacgaaaatcgaaccccgtcccagtcacatcgacaatttcccctgtaggaatattacccgcgccattttttaagtagtgagaagcgtggataactaaatcatgttcaagagccgttcgctgagtatgctccccagctaaattaaaataggcatgattagttaaactcagcgctgtcgttttatcactaatagcctgataattgatatgaacttcattatcatccgttaatgtatatgtcacactggcttcgacggtaccgggaaatccttgttcgccatctgcggatagcaagcttaaagtgaccgactgtgtggattgcgccacaatagtccagcgacgatggctaaaattttgtttaccaccatgtagcgtattgttgccttcattagcaacaaggcgatactcagttccggcgatggtgaatttagcccctgcaatacgattagcaaaacgccctaccgttgcgccaaaataggccgtttgctgttgatgggctttcatatctgcagatcctaaaagcacatcgcgacgatagccattaacagggacaatacaacttaaccatgtcgcaccaatatccataatggagatagacataccaaaacggtttgtcaaaatcacgacttgagcaggcaaaccatcaaaagcggcttgtgtggtcatctgttcaggcttaaaaaaacggttttcatttaatgccattagttatctccagatagcccgccccttggcttgcagagcagacataaatagtttcttttaaacctgtttgttttttatattgggcttcaaccgcttgtgtcacttttgcgactaaatcaggagtcaccagcgccaccacacagccgccaaaacctccgccagtcattctaacgccaccttgcgaaccaatcactgatttaacaatttctaccagtgtatccacttcgttaacggttatttcaaagtcatcacgcatagagatatgtgattgtgccatcaattcactaagtttagtaagatcgccttgttttaacgcctcagccgcttgtaaagtacgctcattttcggtgatcacatgacgagcacgtcgatatactttatcattcatcagtgcctttttcgcttgcaattgcgctaaggtcgcatctcgtaatgcagtaacatttaatatttttgccgcttcctcacactgttgacgacgcgtattatattcgctatcgactaaccctctttttttatttgagttaatgatcatcactaccgcactttctggcatttttaccgccgtagtggctaatgaacgacaatcaattaatagtgcatggctctcttcaccacatgcagaaataagctgatccataataccgcaattgcatccaacaaattggttttctgctttttgaccgttaagggcaatttctttttgactaataggaagttgataaagtgtttttactgtttgtcctatagcaacttctaatgcagctgaagagcttaagccagccccttgaggcacattacctgtaatggcaatatccataccctgaaatacatatttggcttgttgtaaaaaatgaataacgccacgaatatagttagcccacattttattaggtaaaaactcaatgggatgttcgagagagaattgatcttgcgcattctgataatcaaccgcaatcacacgaataagattatcatctcgtttggcggcagcaactaccatttgataatcaatggcacaaggaagaacaaaaccatcgttataatcagtatgctcaccaatcagattaactctgcctggagcttgaataaaatgtgttggggcataaccaaaaatagaggtaaaagaatgagtcacattattaatcagtgcctgcataataaatccttaacttaaaattaagtaataacaacctgttacatcaatataatagtgatgcatcctaggctaggtagtgatttaaaaagcgtccgccatcaacccgttaagctaattttcttgctctttataatggatatcgcttacttggcgtaaattataagcagcttgctctggcgttaagtcgcgttgcgattcagccaacatttcataacccaccataaatttacgtactgtcgcagagcgtaataacggcggataatacagggcatgtaattgccaatgctcaatgctttcgccctctttaaaagaaggtgcaaaatgccatcccattgaataaggaaatgaacaatgaaatagattatcgtagcgactggttaatttttttattgccaaggctaaatcatcacgttgttcagccgttaattcactcattctgcgaatatgactttttggtaatagcatggtttcataaggccatgatgcccaataaggcacgacagctaaccagtatttagtttcaaccacggttcgactaccgtcttcagattcagctttaacataatccattaatagattacggccatattgattaaaatagtcttttaattggctatctttgcgtgctaattcattaggtaaaaaatcactcgcccatatttgcccatgaggatgaggttgagagcaccccattgtttcacctttgttttcaaatacttgtacccatagatactctttacttagcgcttctatttggttatcccaagtatcaatgattttacgtaggctactaataggtaattcgggaatagttttactatgatcgggggaaaaacaaacaacacgactgatccctctcactgcttgagtctggaagagtggattatcggatacttcaacactatattggtctgtcaataatgcagagtgatcgttattaaaaacataagtgcctgtgtaatcaggatttttatcacccgaaactcgggtattccctgggcacagataacaatgtggatcataagagggaagtgtcgctatctgaggtttttcatctttgccattccatggtcgttttgctctatggggtgaaactaatatccactgcccggtcaaagggttataacgacgatgaggatgctcaacgggatcaaaaatcagttttgacataatcttctctcttatttattaaagattatctgatagcgtttttatgatctatttcagataaccgttaggattttgtgattgccaacgccaagcatcggctgccatatcatcaatagagcgaatggctttccagtgtaagtctttttctgctttggcaggacttgaccaacattgtgcgatatctcccgggcgacgtggctgaatttcataagggattgctttaccactggctttacgaaatgcttcaatcatttcaatcacactggtgccattccctgtgcctaggttatagatatgtaaccctgctttttctcctaacgcatttaaggcggcaatatgaccatcagctaaatccataacatggatatagtcacgtacaccagtaccgtcttttgttgggtaatcatcaccaaataccgcgactttttcacgacgacctatcgcaacttgcgagatataaggcgttaaattattaggaatacccttaggatcttcccccatagtgccagatggatgagcacctactggattgaagtagcgcagtaaactgatagaccaactctcatctgcaatatagagatcagacaaaatacgctcgaccatatatttactggtgccataaggattggtagtgccaccaacaggtgactcttcagtaataggcacagtttgaggatcaccataaaccgtggctgatgagctgaaaataatactttttacgcccgcatcacgcatacaacgaactaataccaaagtaccgttaacattgttgtcatagtattcgatgggcttttcaacagattcacctaccgcttttaatccagcgaaatggatcactgattgaatagagtgctgagtaaaaattgtggccagtcgtttttcgtcacgaatatccccctgataaaacagtgggcgttttcctgttaatgcttcaattcggttaagtacctcttcatttgcattactgaggttatccaaaataataggcgtcatgcctgcttctaacatttgcacgcatgtatgactaccgatatatcccattccacccgtaactaaaatttccacattcacctcttttgatttatttcaaatgaaaagcgtcaagcggttttgttgattgcctcagagtttaacaagttcaacaaactaatttcgtgatcaaaccgacatttagtgtaaacgtttacacgcttttcttattccttaactatttaataaaaacgacctaatataaccgtattacagcaaattattgttaataatcgttatatagttattttagagagaactgccctcttcaccataaaagtaaacgattacattatactgaatactttaattatatgataaaactgatattaattggtttttatcataccttattaacatccacgctaatatgctttacagtgaaattaagagtagcctcaatagatgaattgaagagaagagagtgtgatttatatctattagttaataccaattaggagaacgctatgaaacccgttgtaatactttatcaaccgcttccagaaaaactgcaacaaaaattatctgccgttgctgaggtaaaacagtttaacgcgctctctctcaattgtgccgattttaaagccaccctcgctcatgctgaaggattgttaggtgcaggcggtaatatcgataaacactttattgaaaaagcgccaaaactaaaagccgtatcaacgatttctgtcggttatgataatgtggatgttgccgcgctcactgaacgtcatatcaaattgatgcatacacctacggtattaactgatactgtcgctgatacaatgatggcgcttgttcttgccgtctctcgtcgtattcctgaactagctgataatataaaacaaggtttatgggtaaaaagtattacgccggattggtatggtactgatgttcaccataaaaccatggggattattggtatggggcgtatcggtaaagcattagcacaacgcgcccacttcggttttgatatggatattatttaccattctcgtactgaatataacgatgttaaccagcattttaatgctaaattttgttccctagagatgcttttacaacaagctgattttgtctgcattactttaccgctaacgccagaaactcatcatctgttaagcgcaaaacagtttgcattaatgaaagctgacgcctatctaattaatgccggacgcggtgccgtggttgatgaaaaagcattaattaacgcattagagcagcgacaaatagctggagccggattagatgtgtttgagcaagagccactgccaacctcttcaccacttttaaccatgaaaaatgttgtcgccttaccccatattggctctgcgactaaagagactcgctatgcaatggctgaatgtgccgttgacaatctgattgctgcattaaccgataatgtaaaagaaaactgtgttaatttttaattaagcaaagaataaaaaaaaaggtaataaatacaatttattacctttaaactatcaaatagttaacgctaaattaagcaggatcgacgtgtatcatcacacttaaaatctgtgcatgctgtttaagtactctatcatgggcattgaccacaatatcatgactttgattgaccgttaattcgcctttaatttctaaatggacatcaactaataaataatcacctgcacgacgggtttttaaatcatgtaccccttgtactcctggtgtggtgattaatgtattggtgatctgttcaagtgtttcttcatcagcacctctatccatgagatcttgcaaagcttgataggtaaaacgccatcccatacggccaacaaatagcccgacaataagtgctgctagtgggtcaaagaatttaaatccagcaaggctaccaatgatccctattgcaaccactaaagaagaggcggcatctgagcgcgcatgccaagcatttgccactaacatactagaatcgacttttttggctacagctaacatataacgaaataacccttctttagccgctaatgccaataaagccacataaagcgcgatgctatgaacatcaggaatgattgaaggatctaacattttatggatagcagaaaatatcattcccaaaccaacaatcaataaaatcgtccctaacactaatgaagcggcattctcatagcgaaaatgtccataaggatgatcggcatcgggttgcttttgactgcctttattcgcaattaacaccacgaagtcagcaattaaatcagacagtgaatgaataccatcagcaattaagccttgggaatgtgagaagaaaccaattgtgatttgaaatatggataaaaagatattaacaaaaacactgaccaatgtgcttttcttggccgctttgaatttgtcagattgtgttttctcagccatattcaactcaatatcatcaatgtgattatgtgtcataataataatcttattctgtataaatagcctaccctatttgtttataacgaatagagttccataggttatttcaggttccataactcattggtgaggataaaggacgactctgaataacaatcctgtttagggactaagattgctgtccaaacatcatattgagatgctattaacggttaatatgccatactttattgattaagtctctaaaaaattaccaataaaatcctatagatacagaacaataatataattgataatcattcttttgtgcattttcctctagatagctaattaaaatacttttattttaaatatcatcttatttaactcattcctgtcaataagttaagattgatatagttttattctgcctttttagctttttattttaaaagcactaattattactataatataaataattaagtgatagaataatcattctcactcttatttagaacgtagatcacagctatattttttatattcagtgataatagagttatattttaaaactaacgttaagtgaggtttgtaatgtacaaaaaaattctagttcctatcgatattctagaagatgagctttctcaggaactgatcactcacattgaacaaattgctcaagttggcaaacccgagatccacttcctcaccgttattccaaatgcagaacttttcttcggtattgagtttgccgctattcctgaaaaatttaaagactcttcagagcgcactcgcctcgcttttattgctctgcaagatatgatcaaagatacgaaaattcccgatgagcaaattgtttgcaatgtcggtgttggtaatgcaaaagatgaaattttagagtatgcacgtcaaatcgatgcagatttaattgctattgcttcacatcgtcctaatgtttcttcctacttattaggctcaacagcatcatctattgttcgccatgcaaaaatgtcggtattagtgatccgttagttgtaaaaaaagccctttgaaaacaaagggctttccactcaataataattaaagatcaatcattatttctttgttgaatctttaacttcgtcagaagtagaccacacacgatatttcacatctacatcttttggtgcatagacaacaataggtaatttgctgttatagcggataaatgccgcttgccccatattagcttgaacaaaggcgggttttttagtgttatcaagacaacccatcatcgtagacattgggccatttaagtcgcttacgatatagtaatcataaccccaaccttcgagatcttttttatctaactcagcaccaaaccattgacgattacaatcaaccatcatctctttacccacgatcaactcaacttggtaattgccttcgttttctttttgttctaactcaataacatgacgaatttgattttcctttgctttaggataaggagcgactttttctaaactatcaaccgcttgtgcgcaagcagacaaagacatcgctgcaaccaaagataaaattactttattcatcattttctccatattcacagcgccaaatcgctgttaacaaattttgcttagatatttttattagtaatcatcttaatactagcattttataatatagatgctaacactttagcagatctctctctgagaggattattctgataattttttaaagaactcattcttttattgatgaaatgtaaatttgtgatgcactaacgtgcagatcagctatctatgattatactgaaatagagatcgcaatttctttcattaggaggttatatgttctcagaaagacaatcactggtttctcagttaaaaaatacccatcctcgtttccaagctctctatgataaacaccatcgacttgatcaagaaattgctaaattagaaggacctaatggcgcaggctacaatgatgaagttgcaaaactaaaaaaagaaaaactctatctaaaagatgaaatgcaaaaaatacttcaacaagctgagaaataaaccgttcttactacggcgcaaatattatttatcagcgacctgaagcgatgaccttttgtcatcgcttttttatgattaaaaacaaagtttccctcctaaaaagatgcataataaatacatcttatataattaagggctaacaaatggcatctatacatggtcatgaagtattacatatgatcctttcatcaaaagtggcgtttacgcaaagatcacttatcgaggcaattcatcaacgttttggggaagaagcgcgctttcatacctgttctgctgagaatatgacagcggccgaattagtggcatttttagaaaaaaaaggaaaatttattgctgctgatggcggttttactaccagtgaaaacaaaatttgtcgccattagtaatatcaataagtagattgccagtaagcaacatgtttggcatgttgttaactatctatctaatcaataaaagtaagatgctctggcaatctctgtttaacttaattggtcgttaatcatcattcgtttggagccaactatcatcttcccaaacactttgaattaactccataatatgctcatgcttagcttcatcttttacgcccgtgacttggatcgtattcatgctactaaaagcgatacgaaactgcatatcaggataaataggaataattttttttcttagttcatgttctaacagcggaaatagtgagtcagtgacattagattgtttgttaaataaaatttccacacgcattattttcaccataccaaggcaaataaactgtatataaatacagtattatataatcaaaaaaaagaaaagtatttttgcaaaattttttctttttttgccttaaaaatagccaattaatttatcatcccagtcatgcgttatgataaaatgcattttaaatgcaacaataagaagtgagagtaccatgtcaggtaaaagaattaatcgagagaagcaaaccatccaaaaaatggttgctctgtatgaacgagcgcatcctaataccgaccccgagtattatcagcaattagtgacatatgcttataaaagactagataaatgtcgctatggtgaggaaaaacccgcctgcaaacaatgcccaattcactgctatcagccagtaaaaagagcagcaatgaaacaagtcatgcgttgggcggggcctcgaatgctaatttatcatccctatttagcaattaggcatcttattgatgataagaaacccgttcctgcattaccggctaaaaaatctaaacgtttatcgggaaaataaagtctgctttttttaatcggtataatacatgttgtgctaaagggtgtgttttatctagagatggatgcataaaatattcagacttcttcataccgagttttttcatcaccccttctgagggtaaattggtcacggcggtaaatgccaccacttcttccagtttcaactgttcaaaagcatattttaatactgttaaggccgcctcataagtgtaccctttacgccaatgagattgtgcaatacgccaacctatttcaacacacggattaaaaggcaaaggggcattaggaatatttaatccaacaaagccaataagctcttgagtctcttttaattcaacggcccaaagtccccaaccattttgctgaataaatttatcacgcaatgtatcaaccattgcatcgctttctgcgcgggtaagtggtgaagggaaataacgcatcaccgatgctgaggcgttaatatgtaaaaaaaatggcgctttatcactttcacgccattctcgtaaacgtaatcgaggagtagccaattccatcattattctcattctaattagttaggataataatgataaaataaaacagatcataagtaataaaaagagaatcgcttttattttttattttcttttagtttactttctgcagttacagactctttattggtattaactgtaccttctttaatagatacaacacgttgctgtgcaacggctttagcttggtgttcaacctgttcagattgtccagtaaagacaccgccacgtttaattgacatactgccacaacgactagtgccacgtagttcaccatgctctagaatatcaagattgtttgcggcacaaatacctttaacaaaaccatcaataatgatgtctggcgccgttaattccccttcaacttggcccgcatgcataacacggatcacgccatcttttacattgatattccctgaaattttaccccaaatttgaatatcaccatcaacgttaatatcaccttgaaatacagtgcctttagcaataatggtatacaatttttgctccggcataggctttttttcttctgccataactggagcaataggctccgcggcttttggtgtttctgtttttcgactaaacattgccgttttttttaacctcaaagttatagagtaaataataatgctaaaaattaggataagggtgatcaaaagctcaccagctatttgatatcgccaaaaagccattaatgcacatgaccaaataatccatattatgctaaatataatatcccgctgtgttcgcttattatccataattagctatatctgaacctccctgataataaatacaccagctctacttattattttaataaataattattcaagtcgatggcgataataacgccatatatcatccccaattttgggctttgctttttagggaaaaggtcgatttataagtagataaaaaagagataacaattaattttttgctaatttatgaataagatgcacactttcccatcctataatgatgataatttataacacgaattaacatatagctaatcgcatctattgataacaacttgattattcaaaaatcttcaacaaatggaggagagctaacaaaacaacaataaaaccatcacagataaaatatgagacattagtcacaaaaataaactaccgtctatttttaagactaatttcttgatacattactggccatttttatgatagacgttaatttttatgttttcataatgttaaaactatataaagacgaaaaaatatacttggggaaaatttatagcaagtttatttgcttctttgccatactaaaaaagataataatatatagtgaaaataacctataaaaattacattttattttttttatcaaataaattcattgcaaaaaacactcatttaatatacaaaataaaaacatacacacaaaaatttattaacaactcatattaaacaactttatagtgtttaaaaaacacccttattatgctttacagtgtaaattttaaaatgaaatataactaattgttatttatagaataaataactctatttcattatctgtcaatatattattacaaaattctactaaattttgtcgcattcttttcattaaatgactagcttaattaaattgtttttgcaatctataaaaaatgacattaaattaaacaaatgatttatcttaaattagaaatggcaacttcaatgtctaatatctaaaaaaaaaccacatcataataaagaaaacattctattttttatttttaatactctttaaataataaagaagctactactttatattctttttatttattggtattaaatacagtgatacttatataataattttgggcgaaaaatgaatacaatacaatgtggtgaaaacactaaacaagattgcgttattcaaaaactctcttatttttatccgcaatatcaaatattagaaaataaccaaaaagctttatacataatcagaaataatgcgctggtattacaaaactgcacaaatacaataactattaacaaagatcagattattttcttacaacaaggaaattataccataaaaacgctaggcaatgagccttgtgaaacaatttatattcctctttctgatgatttcttaagaaatttcatgtcaaaaaatagtgatattctcagtaatatcgatagagaggaaaatttctcatcggcttttatctgttttgaagattcacctctgatccatttttgtagtaatggttttgattatctttcttcacaaaattgtccagatacttttactcaattacgtattgaagaaatgctcattctattactttcttccgaacaaggtgccaatcttatggcgttactacgccaattaagtcataggcaagttgatcgcttgaaaatatttatggaaaaaaaccatctaaaaaattggaagctaaaacagtttgctcgcgagtttggtatgggtctcaccacatttaaagagttatttaatcatgtttatggaacatcgccaagaacatggatatgcgaaagaagaattatttacgcacatcaattattattaacaacagaaatgagtattgtcgatatttctatggaatcaggattctctagccaatcttactttacacaaagctatcatcgacgttttaatatgacaccgagtaaagcgagacatcttaaattaaaattataaaaaatccgacctattatcataatatcatcgttcaattcatcgctagaatatgcaaaatttgttctgatgagtgaaactattgtgataaagcgacaaactaatactagcaaataccaatattatcgttattttaatttgctaaaaaaaatgatggcagatgaaaataagaaaactgttgataatttatttaatcttcagttttctttacttattacaaataatgatataaatgagaaacaaattaaaatattatctcgtttattatgccgtgaagctgtagacagtttattgcaatccacatggtttttacgcaaaaaacattgctcagtgccattaactaaagaaaatattaatgccgtagtaaatttggctgataaataccaatctaatatatcagatattaattggaacgctttaaatgcaaaaatcaacattgctgatcatgcacgttttattcaagctatcataaaacctatttttatttggtgggttgaacatataacaccgcatatatttacactttatgagataaaaaaagagctcgaatatcaaattaatcaatgtgaaaacattaaattatttgaagaaaaggaaccatcaaatatagcctcttcttttttatctttagaagatataaaaacaaaattagaagctgataaagcacggttcgtcgtgatagatgatttgttgaaaaaggatattaaattagttatagaagcttgggaaaaagagccggtattcaataaaaaaataaataatacattagagtacttacaaaatacacaaccgcattctgagttattacaaccattatgggatattttaatcactattccacaacaccctgaaaattgtaaaaaactaaaacactggctagtagaacactctttatgtttaattaatgatgaatttatgtggcatgtataaaatatcagctcttcattatttatagaagagctgacaacggtaatttattaaagggtgctatttgatagctaaaatttcaattgtcactatagacatcgattctggaggtacttgccctgggataccatctttcccatacccgccatcaggtttaatataaattttagctttgccatttaagcctgctttagcaacaaaagtattaagaggcagtggaagttgacggtatggtaaaattaacggcttagctttgtcataattaagtgttactgtaccatcggttaattgttcatgcatagcgaaaacaactgttttacctgcaattgaatccacaggtttcccttgttttaggattttaaagtaagtgttatcatcgtattgcacatagttctgtttttgtatttccgacagaattgatttatttcgttgggcattatctttaccgataattgaataggcatatgcaagctgacttgcaataatctgcccttctcccatagctttatccaattgctgttttaatgttttattctctttttgaacactcgcactttcgctatttatttttttaatttcactctctttttcttttagttgctcacttaattttaattctttttcttcaagtgttttcgttagcgcacgctgagcttcaagctgcttagagacttcattaaactctttttgagaattcgctaaaacactttcttgttgcttaaattgagccgtcgattctacttgctgctgttttaatgaagcaattagttggttactttcagaattttgttttgctaactgatctttagcttgtgttaattgtgtcgttaatttatcagtaagcgattgtttttctgctagttgtttctctaattgagcataagcgttatcgttcgctattttgctctctttaagttgcccaatggtggtattgttctctttaaattgggtatccaatgcttgatacttattggcaagatctgcctgagctttctctaatttagcgattacaccatttttttctgaaatcaaagcatcaaaagctttctcacccgtagataaactttttttcagctcagctaattcattaaccttattttgtaactcaagcttcaacgctgggatctgtgttaattgatcatctgcttgtgctttttgttgttgaagagtcactaacgaatgatttaactgttgttgctcttggtttattttttttatgtgatcgttaagttgagctatctgttggcgttgggtatcaattaactgattattcttagctagagtagcttcaaaagaggctttgtttttagctaattgattttctaaagattggcgcactgctgataaattagttaaagaattttgtagtacctcaatctcttttttagcactgttatttgttaataaccgttgagcctgcccatattgtgattgtagctgctgtttttgttgctcaagttgagcaacatgggtagtcaattgatttaatttttgtgcctgaatatcaaaatcttcttgctgtttagttaatactttatttttttctgtcgcatcaaacagcaactgatctttttcagctaattgtgcaagcaacgtatcctgctcttttttagactgtgctaattcattttgtaacttagccacagactgttttaggctatcatcattaagtaaattattcgctacagccagtttatcttgcgtttttgccaattccgctgttaattgttgaactttttcttctgcggtttgcagtttagttaaactttcagttaataacgcggcttgttcagtaaatttctgatacagacgttgatatttttcgcgagtatttgctaaacgatttaatagctctttattaaagagaggttgcttatggtcaagcaaagaacgtttaaattgatataaaaaatgaaaaggtatttcagtcactgaatacactgtatttggaatgaaatctaataaagtattatcagtagactgatatggctgccctggataacgcttacgcgtataaagcattagaggattatagaccacggatttactttgataataccgattcaagtcctcaggggtaaattgcggtttaatcggtacaaacgaaagcagtggtgttaaataatgagtgtaatcactgtttattttgttggtatttgtagataccacagagcattgttcagacaaagtcacctgaggtacagagggagtcgccactactgaccaatgctcattgcctaccacggtttgatgttcattccgtacaacaggctgtttaggctgaattttttgttgtggtttttgtggtggcttttcctttaatgtcacagtggaacgcaccgttccactacgctgatcgggagtagatgaagatgaaattgttgcagagggttcaggcttaatatcaacgggctgttgtgcttctaaataacggtcaaaatcttcaatgacaaaattaaactcattattagcaaaagacagcgccggaaacatcataaaagcgagacaagcactctgctttaatttcatagtaattattcacctaatttcttcagtgtcgaattcacagacataaccgaaagatagcgcactttagcacatagtacttcggtcttagattcgatactcatttttaataatgctaagctatctttactagcggtattttcaacactacggtataacgcattaatttcactgatttccttaaattcatccaccatagatttatactctgctggtgaaaatgtttttaaagaatcaagttgcttgatacatgctgtttgtgatgccagtttttgctcccctacgttcatctgttgataattattatcagcaggtgaagttaccgtggattgcacctgtgttggcaccacctccacaggttggctatcaccagataaaatgctacatcccgatagtgtgagaacagtaactgccatagacagagctaaaacattgtttttatttttcaataaggacatcatttttccttaattccgatcagtctaaataagagcgtatgtagtatcgcattttaagctatcttattataattttctattgtctattgcgtactaagtcaataacctagcgcataaatgacaataacggctcctatcctttcatttcattattttttcttacaacattgcatccgtcacattaaaatcatcattaaatgagtatcggtatttttaattggaaaaatgttgtcgtgttagaagcagttatttctacacaatgaagataatagcagataatcagaaaaataataacatctaattttatcatttaattacctttataaggtgtaaaataatactcttttaatgtgttataattacttttattttgttgctgttttctattatcaggataaaatcaaaatatgaatatcaaaatagtaattgatattcattgttatccttcaatataggagagttaagatgagtcattttaacattggtgttgtagtcggaagcttaagaaaagattcctataataaacaaacagcaaaagcattaacctcgctatttcctcaagaatttacttttcagttccttgatatcggtactcttcctctctacaaccaagatgatgacgacaaaacacctgaagccgttgtcgagtttaagcaacaaattaagcaatgccaaggcattatcttcgtaacacctgaatataaccgctcaatccctggtgtgctaaaaaatgcgttagatcaagcctctcgcccttatggtactaatgcatgggatagtattcctgctgggatcatcggtgtttcaatcggtaatattagtactgctattgcacaacagcacctgcgtaattcattagcatttttaaatatgccaaccttaaatcaaccagaatgttttttaaaatggtatgatggaatggtagaaaacggtcagttttctgaaaaaacagcaggttttatgcaaaactgggttaatagctatattaactttgtaaaacataatcaaaaatagcttaaaaatagtcctaaatagatttcacagagtgtagtttataataattacactctgttttattttaaagagagggaaagtaaaactaacttgctaaccaatcgataaaaatataattaactattaattagcaatatttaaatagcacctcctaataataactaactttattatagcaagtaacccatgtataaaaatgacatttaataatctatttaaaatagtaagtggtaggtatttttagtctattagttagcgcaatttaaaaaccaatcaataaaatcattatgttattctttctatctagctcataaaaactaataaattagatattactttagttaccaaaacaaggggaaataattattatcactcattttacacatcttgctcctattaaacatattgtgcgttatatctctcaataatctctttctataattgtgatatataaaaaaattacttatattaataatccattagatactgacaggtaaatcatggataacaacttaagagaaatcgaatgcgagctcgctgctttaaaaatagtcactaaatctctactttgtgcattaaatgataagcaacgacgcgatatgttaggcaatatatctttagttattgaagatacttcaagcagatatccacatcacaatgaagttataaatcttactgagcaatatgtgaaaaaacttatccaagcatagactcattatatgattttaatggtttccccaccaatttaacatcataggatgcacaatattgcatcctatgctcttctttttactaaaataacgttcactcttttctattacttaagtcaaatataacctcttacactctatctttatcctccagtgattaagttaataaaatagatcactttagataaagcgcatctgtaaaagcgttctttctgtactaatacattttttacttggatttacttaaataattaattaatatgcaaaattatcgcattgctatcgtaatagttcctcggaagaatatatggaaaaaaaattagttaacatagaacatgaagttgcggcattaaaagtgattttaaaatcactattacttacattaacaaataaacaaaaggaatctgttatatatgatataaacaaaaccattagaaatgcttatgctgaacatccacaataccaagacataatagaaaaaaccgaacaatacataaaaaagatactccaaaaatagttgtgatttacatcactatcagtaaatagctataactatttatattgttattcattatttttagctttatatctataaatgctgagttattttaatatgacatcatcaatgattgattgagttataatatatggctattatttgccatgttataaaaaaaacaacaacacaaagaattattaaatttattaataaattacatacagttaaaatataaaatctatcaatgcaatatttttaggtatttgctatctatttcttgctgatttatctatttaataaaattcgccaaatcctggatcacagataaccatatattcagaaaatgaaaattgatagacttcaggtgagttaagtttggagcgggcgaagggaatcgaaccctcgtatagagcttgggaagctctcgttctaccattgaactacgcccgcagtagattttctgattatactccagcaaattttaacggcaatcccctgcctatttaaatggttatcaaatagacaatgtagagtgtaatcccttgaaatttagatataaaaaagccatcttgcgatggctatgaaatagcttttattgcattgaaataaatggatttatttctcatcgcgtccacatatcgaccacactaaatcatgcccggaaattatccgggcatttcatcaaatatctaacatctgttgtcaatgcttattaaaatgtggttctactcattcaatcaatggaggctttgaaataaacttattttagggactttacttaccacagttcgtatctcatcattagaaattcttaagattcttctgtttatcgttagataaggaaaaaacatggaatttctattcattgtatctatttttttatttttaatatctgtcgtttgcataactctaggcatgataaaacctagcatcatcaagttaaaaaaccgcaaacaatcatttattgcttttcttattaccttcgtcttatcaatcattggggttcttaatttcgctcccgatacccctaacaaccaaatcaccgaaacacaagaaacaataaccgattcttttgtatgtagtaataaaaatgcaatttacccttcaatttctgccatgatagaagattttaacgactatccatcagatatgaatggctttgagcttattagcgaaaacccattaaaaattagattatccgcttttgctttagataatgattttagtgatgttaaagataatttagctaaacgagctcttgtttatggcatattccgtacatttattaacacaaacaatgatagtatcactatcgtttctaatttagttgattacaacaatagttataaaaagctaaaagatagtccagaatacacagctacaattaccaaagatcaagctctaaaaattacccagaaatatattccaatcaattcattgaatgacttaattgatgaaaactgctcattcacaaaacagtttaatgaattacgttatgacgatagcggtaaaaaaggttttgataaattctttaatgaattaacggcaaataaataaaacaacgcccggaatactccgggcattttcctcaaatcgctaatgcctgttggcaacacttatctacatgcggctctacccgttcaatcaactgaggctttgaaataaaccgcgttacggtttcatgactcacgaacgtcgcaccacaattgatattctggcactggttataacgttctttggtatcggaagatatttgttgactactacgggtatgggcggcatgaccacaaacaggacaaatcatcataaacgggttacctctttatgatgtggaaattacctgtaattatacacaggcactattccttatccatatctatctcactgcttttaacttctaattctaacgaggtggtaaatccgctattgttcaaggaatgactcaccgtgaccaacgtccaataggcctcatcaatctcaggcttaaatccgctaacctttacaggtaattcaggaaagagatccgcacgccctttcgcaagggtaatactaaaagaggcaacacctcgctgtattttttcccacgcggctttcgcggcacgttcagcattggttttactcgcataagtatgagacaacaccatcacattaccttcttcaccgacaaggtactccccttgtttctcctcttcttttttcggtttattggtagtgggttttctacggcgaatttgtgactgtgttttttcttgcggtttacgggtatttaaataattggccgtcacaccagtgtaagcgcccctatccactaatgaaaaacggtgtccatcacccacacttcgggtaatttgtactagcggtaatgcttgaccactggcggtggtattgcccccctgcaccataaacagcaaattgccgtttttaacacaggcggtggcaccgtttaattgccctaagcgggttaaaaaactgccgtctgactcattggtctgatcgatatgttcaattttcaccgtatcaagaccaggatcaaccaccgccgcgacattattgcgccctgcaatcgttctgacgatatcgcctaatgttttttgatgatacgacatttcacggcgcacattcagcgttgccctaaaatccgcactacgggcgcgcaatgtcattttatcgggtacacctgaatgctctatctcatcaaccgtaaacgagcctttatgaataagtctttccccctgccaaccgagatgtaaagttaatacctcaccgcgttttggcatcattaatgcgccatcagaatcatctaactcaatatcaagctggtcagcttcaaagccccgattgtccgttaatgaaagcgaaattaatcgcccttgaattttggcactgatatcttcatcaccagcaattaacacaaaggccggtatgctacttttaccggtgatcatttctggcaacattatgataaaactcctttcatcgcttcaccggcaccattggccatcatgcctaattggtcgcttaaatctcccaacatctgactgatagagtcatccacccgttttaatgtcaacgagaaatcaatttttctagcggctccatcttggaaaaattcggtgtgggtgcgttgtaaatcggtgatcacaaacataccgtgaatggtgcccgtaccatcaataaacgaccacgctttaccgctatctgccattaactccaacgctaacaatgaaactttaccacccgttaatgagggataaagcgcccctgataaggtgatcacatcggtatcagggccaataaactgttgtgccggtcggcgtgcgacacgttgagtaaaaccatgtcgccacgtttgttgtttttgtagggattgataaggtacggtgcgtaactcaaacacaaataccccaagtgctgccatcattaccacacctcactgtcttgataacggctatttaatcgtgcttgtttttcacgctcacggcgctcaatttccgcgataacaagctgggcaatatcttgcgcggattggtttggttgaggatgaatattaatttcataatgtgccggcgcgccttgataacgttgttgttgaatattcacattagccggagcaggacgatagttttcaacgggcaaactgtgtgggtgcaacggggcattttgtgcctgtaacgaaaaggcgctacctaacgataatgcggcagccgctaacatcgcagtgtgtttacgactggtgatattcgcagggccttcgacaatttcagggccattttctcccgcaataccaaatttaccacgcgggatataaccgccggaatcatacataccggcaaagttgctgttgtacgaatctaacgcagactgcattttcggatcattacttttcataaactcaggggtgagtgcttctttagcggcggttgccaattccccaatgctatttttaaagtccgtccatttgtttttgatcccctgaataatggcatcaatcaggtcactaccaaactgcaaaaatttagccggtaacgctttggtgtcttcgacaatctcattccattttgttgatatcgtggtttttatcgtttcccacgtttcttgtacagacttaacaatattattccaaccgtttttaagtgttgttttaattccctcccaaacatctgaaattttagtttttatcatcgtccatgttgtttgggtgtagctgactatcgaatcccaatgtttaataatgagcccaagcggtgtccaattaaagaatatatacttgatggcctcccatgcactcttaatagtatcttttagcgcttgccatgcgatagcagtatattttttaacggtatcccataccttgtaaacgtaggggccaatggtgtcccagtttttataaatcagataaacagcagccgcaatagcggcaataaccaataaaatagggttagctaatatggctttacccaatcctaaaaatgcactacctaataattttatcggttttaataacagtgtgagggcgttaccgcctttaatgcctaaaattgacaagcttaatttcgcggcggctaatggccctaacattgccgcaatggataacgagagaatacccagcgtggtaataatgcccgctatcgctaaaccgatcatcgtcagcgtcttagccaattcagggttttctttcatccacacaccgactttagaaatcacacgggtaatactttgtgatatctggcgtaatgggctatcaatgccgtcaaaaatttgaatacctaaatcttcccatgcggattgcaggtttttcatatctccgcttaagttatccgtcatggtgcccgcgactttttgcgcttcacctttagcttgttttaagtcagcaacaagagtttgcaactcccctttacccgcttgttcggccagtaccgataacgccgaaaaagcttcttcacccgcaatatgtttaaagaaccccgcccgttgcgcattacccatcttagcggttttcttatccaactcagctaataactcaggaaagtcgcgtaagttccctttagcatcacgggttttaataccgagttcttctaatgctttggcggccattttcggcggttcagcaagacgccctaagatagcgcgtaatgaagtacccgccattgagccttgaatacccgcatcccctaacttccccgttgcggcggctgccgtttctaaatcaacccctaaccctgacgcaaccggagcaacgtatttcatggtgtcgcccagcatggttaaactggtatttgaacgagtaaaggccccgaccaacacatcactcactcgccccatttggtcagaatcgagcttaaagccggttaaaatattggagccgatatctgccgtggtacctaaatcaatatcacctgctaatgacattgccaatgttccgggcatagcatttttaatttgctcaggcttaaaacccgccattgcgtagaatgcctgaccttgcgccacttggttggcggtaaatgccgtggttgcacctagctctcgcgcttgttcacgcaacatcttaaattcatcggagtttttatctaagcgcgttaatgcctgcacctttgacatcccgacattaaactcgtaccccggcattaaggtttgtttcgcggaatacaacatacccgcaccggttgccgtcatggtggcaccagtgcccgccattttatttcgtacatcgagcgtcttttgatactgcgatttagccgctaccatgcgccgctcttgttcagcactgcgccttaattggttttcttgccggcggagctgttgcgtagtgcgttcaatatcaccattcagtcgccgttgcgcttgaccgagttggtttgttgaaatgccattagcttgtaatgctgagcgctgtcgctgtaccgactgctgtaactgctcatacttagttttgagctgccccgcttcccgttgcgcttttttaaacgcctctaactgtttttttgtgggattttcactgttggcaatttctttggcgagagtggcaacacgttgtgtggcggattggtacgcttgctgtgtggaggttaactgctgtttaatcttgcgaaagccgtcaatttgtgaggcttgctgattaagggtttttaatgagtcacgcgactggcgtacagcggacgccagtcgtttattactttcttgcgcactgcgaaacggtgcggttaatttatcaaccgcactcagtacaacttgtaattttaagttattactcatcctgttgtccgctacgtttcgccgcttgatagcgccatgacaataattctgaaaggctcattttgccggtgtctgccggtgaccaatgaaaaatgacggcaatatctgccgccagttcatcggtggttaattcgcttgggaatcgggcataaccgacttcggtaataaaaaattgaccacctgcacacttaggtttaccaagtcgcccgcggctaaagacagcacatcgtttttggttagcgttggcatagtgatgcgcggtagcacctgcatcatgctatcaacatccatatccattaaaggctgtaaacgcacaccgcgtaatgcgcctgaattgggtttaagcacggtcactttgtcgattttggtttcaccacgcataatcggttgttctaatgtcactgtggcttggtcaccattgacaacaacccattcaatttgcccttggttttgttcttcgattggctttttcatgttctctttccgaatttaattaaagccctagcgcgtcacgctgtgcttgtaacaggtctttaccgtccactttttccaccatattgacgatatcaatttcaatgatttcttggccgtccatcactaacttgtagtaagtgggttttacggtaactttggtttgtgtgttgtcgcctgatttccagttacccggatcgatttcgctataacggccacgcagaaccacctctacagcaagcacttcccccgtatcatcacgctgataagcaccacaaaaacgcagttgtacggcatcaatggttgaggcaccccattggcggtaaacgtcgatatcagcaccaccgagagtaaactcactatcaagcgcgccgtcatcaagacccatatcaatttgcaccgaaccattcataccgcccccgcgataggcttctaactttcgggtgattttgggtaatgtgagttcttccgcaacgcccacataattggtgccattcataaataaattaaaattctttagcttgcgtggtaacgccatgatttaccccttaattttgttaccgaagtccatcaggtatttatcggtaatacgctgacgtaacatcagattttccattggtggcacgggtgtatagtcataatccagtgtgagtttgccgtctttgagtgcttctttgctatttgatgttgggtcataccaacattcaccgcctaacaagtagccctgactgaccagtgaacgtaattttgcattgatggtttcaacgatatcccgcgctaaagatggcgttaacggtttatcaattgcccacatctgcccttccgccatggtgtcagcgaggacttgcgcgctacgggtataagattcaaaggcaaacagcggatcatccgaacaggtacgcgaaccccaaaaacgaaaaccatcacgacgaataagcgtagtcacccctttttcattcagtaagccggcatctgtcgcgggatcttgtaaatcccaatagatatctttagaaatgcccgtgacaccgttaacggtgatatttgatagggttttatgccaaccgatatcattgtctaacttggcacgcagacctaacgcacgcgccgtggcgtaagcggttgattcgctgttggtggtgctatcccatgaggtaaaatcaggaaaaatgaccattaattcacgctgaccaaagttgtcacggtacttgattgcttcgctgatatttttacagtcgtaagcagacacataaccaaaggcgcggagcttttgacaaatcaccgcaatctcattggcaaccgctaacgtgtcatgaccgggcacaccaataatacgaggtttaatgccgtgttgggcttgtgatgctaacagtgcttgtaaccctgtttttagcccttcttcggtagtaccaccgataatattagtggtggtttctgcctcttcttcaccttgtgcaacacgtactacaatagtgatgggtttagcctgatctgcaatcgcttttaacgtgctggctaaagtaccggttttccctgctttaccgataccctgtgatacatcggtcaataagacgggcttgtttaaaggaaaggctttttcgtccgcatcatcagcggtgcaaactacgccaacaatagcggtgctgatagtgcgaatggggcgggtgccttcgttaatttcaataacgcgcacaccgtgatgataatcttgtgccatgctcacggactcctataactgtgtccgtgtagcatgaaaaattagcgattaaattgcacgaaagcgggattgtttgaggagctgtacaagtgaataatatcagtctaatacatagacacctctagcactaccataagtactatcagtcattttcagctttttcccatcacttgatacttgaagttcccagaaggcagcagcatggactgatactgcaaattttatatttggtataggagggactaaaaatcctacatatgcttcattcgtgtatctctggataaatacatatttacctaaaatattttcacttaacgttatctcaacaaccgcggattcaccattaaaatcccctacctttcgccattggcgctcagtgcctttcctatcatatcgattatctccctgtgcttgtgttaatgccccaacatcacccgccgttaaacgaatatcagcacttagtgacttaccatttactttacgcgtgttaggtacccgcccattggcattattgttagcattgtttgcggcagtctttgcctcattcacttgtgccggtgttgcagcacccacatcacccgcagttaaactaatatcagcacttaatggtttgccattcactttacgcgtgttaggcactcgcccattagcattagtgttggcattatttgcggcagtttgtgctgtgttagctttactcactgcatcgttagcggttttctgtgcggcatccgctttgctcactccactgtttgctgtggcctgtgcattagatgcggcggtcttggcttcattcacttgtgccggcgttgcagcacctacatcaccggcagttaaactaatatcagcgcttaatggtttgttgttaattttacgggtgctaggtacacgaccattagcattagtattggcattatttgcggcagtttgcgcggcgttagctttgcttactgcatcgttagcggttttctgtgcggtatctgctttgctcacaccactgtttgctgtggcctgtgcattagatgcggctgtcttggcttcattcacctgtgccggtgttgcagcacctacatcactcgccgttaaggtaatatcggtactcagtggtttattattaactttacgggtactaggtacgcggctattggcgtttgtgttagcggcatccgctgatttttgtaccttacttaatcccgtgcttaattcggctttggtagcataaagcttagcgacttccgctaatgtctgttttgatgcactttcaatcgcatcattgacaaactcacgggtcgccaatatcaccgaggggtcaaccttcaactcgactgactcggtatgactaacggttaatatcatgcggatagtctgcgttcgtccgcttccctcttgtaattgtggcttataggtttcagggcaattacccacggcaactaaactgccttcatcatcaaataaaccaatctcacgtatccagtaaccgccctcattttcagggatcacttgttcagcaattatctgactgtcgttttttggatcaacaaataaggtatttaatcccgcgcgacgtttttcgcctacgagtttagtttgttgtgtatcgggtgtgggcaacattccgccaccgtcacccacggccatttgggtaatttttaaggtggtgcctagtgccgtggcttttgccaatttattggcaccaatcaccgttaataaggcaaaaaacttagcgctcatgtgcgacctcaactttatcaataatgtgtactccgaccgccgttaatggcgcaccagacacggtaatttcttctgcaaaataggggtaaaccgttaactcatcaccgctaaaggtggcggcagaaaggtaaaattcaccttgcgaatcaaggttgatagataaccctaagagatgccgactaacagggcgtgcatcggcaatcaaacgctccaattcgtcataaatctcttggctaataccgttttcctgcacgcccacatcaaggcgaaatgtgcccggcggatcgtcggtttgccaccactcagtgactttgatgatgtaaccgagtggctcaaccacacgcttaagtgcgccaatggtacccttgtggcgatgaataaacatcgaatcccgtactacttgacgcttaacaggctccgaccaattttcatcccatcgatctactgaccaagcccatgccagatatggcaataactcaatggggcatgtgctggcgttccataattggcgtaaaggcacgggcaaggtttgcaaggattgacaggcaatggcggcggctttttctaatgggctactgcctgacggtaataaactattcatccgagccaccaatggttaaggtgctttgtgtgcaatacgaagcttgtgttttatcaagcactacatctttagtgggttgttttaactccacacgttgcacaccttccacatgcaatgcggcataaatcgctgacagacgaatatcacgccctaagcggtgttgctctgtgatgtattgcgtcagacgttgatttgcttctttgcgtatcggctccgactcaggccccggaaataaaaacaacgtggcatcaatttgataagggataatttgggcggattgcactttgatgcgatcagcaactggtcgcacatcttcatcgtttaacgcgtgctcaacaatgcgcagtaattcttccgatgcggtgccgtcaccctcacgagataacaccgagatagtgacatttgccggcgttgggctgatcacggacacatcggacactcgaccatcggcactacgggcatgaaattcataactacccaccggccccgcaacacttagcccctcaaacgcggcgggaatgcgtaaacgcaaatcatcgtcagactctaaaatcgccggtgtaggcggaatagtgttgttattggcagggcgtaacactaaacgcgataaattataattcgccgctaactgatctaaatccgccccttttgcatacgccaccatcaccgcgcgggcagactcattgatacgctggcgcaataacaactcacgatagacgttttcttctaacaacttggtcagtggttcagactctaacgataacgtgttagcaatcgcatcacgtaaatgcggtggcatcgcagcaatcaatgccgttttgcgttcgcgtaataattgttctgcatctaacgactcaatcacatcgggcggtgttaattggcttaagttaatcgtaggcatgttatgtcaccggtagagagaaattaatcggttgttggttatgggcgtaatagccggtgatatcgacaatcacctgttcgtgttggctatgaatatcaatggccgtcatcacaatacgtggctcccaacgataaactgcggtgtaacacgctgacattaattgcaatcgcatcttggcgttaactgggccatcaattaaatcggccagcaaactaccatattcacggcgcatcaatcggctaccaatgggggtattaaaaatatctttaatagactggcgaacgtgctcaatatcggtaatatgttcaccggtttgtgcattcatgccgagatagttcattgcggttgccccgtattaccatcaccggtacgcacaccactgtgggtatgggttgaaaccaccacgccattagaggacattttcccaccaacatgggtaatatcaccggtcatagtgccgcctttttgcaccgtcagtgatcccgtagttaagttgttggtacaaataacggtaggggtatctaaggtgattttgcttgtcgcgacacacgtaatgtcaggtgacgtgactttgaccgactcgcgggcttcaatcacggcagttttaattcccgtaacggttagcgcccctgttgccggctcatattcaattactgccccgtctttatactcatgacgatgcgcggttaatgaggttgacggctctgaaaaatcatcactaaatatcgccggcaacacaaacgaggtagttaaatcgccaccgattgatagcaataacacttgttcgccaacattgggcgcccaccatgagcgcgagttaccagcacgtgcagtcagccacgggcgccagtcggtttcattgtcgcccgttttaactcgacaccctttttccgcactgacatcaatcacaacgccagtacggatcaagttttgtatttttcggataagctctgcgatattcatacccgcaatgtgcaacgggaaataaaaaaacgcacgggattgggattgtttcaaagacaggacaattaacgggaaagaaattccagtaattgattttcaatatgtttgatatccgccggtgaaaagcctaatagctttctttcaggatattgaatttctaatgacttacctcgcacacgctcttttaaaccgtaatgatgcacggcagcaatgcccgcgacttgcggagcaaaagaaagcgtgacacctttatcattggccgacatacgcaaataacgggcagtggctaaacgcttaaacatgcgagtctgtttattgggctttgcggtgctgattttgtcttttttcacctcaataaaacgcaaaatatcgcgcttataaaaactacgttcggctttcttttccaagtcgtaaccggtgatcacctcacctttttttgttttgcgtaatcgccaattttttaaactgcgagcctgtcctttccagacaaatttcattcctcgcaacacggtaaccgttgatgctttacgtttggtgaatgcggttccatcgggatttttttgcgcgcgaatacgttgcaaattgcttttgcgtaaatcacgggcaatttcacgggctaattttttacgttcattgggtgacgcttttgccaacatagcggctaatgcttgggttaacgggctgaaatcatcagcgttcatgagccacactctcccaactctcaaacggatcagccggctcttcaatggcaccaacaaccaatttatccgcttgcacattaacgaggacacgctcagtcaactttaaatcaatgctaatactggcggtctggttgctatcaataaaggcatcaaaggtaaaatgactttggcgtttatcgggattaaggaaaatatcaggttgatgttgttcaatccaaccaatgatcaccgccattaacacatcttggtcacctggataatcatcaataataatattgagattgtattgatactcataagattgactgcttgcacccgttgccacaatcgccccgccgtcaataaaggtgtagagcctatcggggttatcccctaaatagcttacctttttaattaatgcatcacgcaggtttgcaggctttttcatggtttaactcattgatgtattgcaataatcggtttatataatcaatcaaatattctgtttgtgccttattctccgccatcatttcgaggagacgtaaataatcttgttgagctgtttcggtaagtcgtgcggaggttgcattacccatgccggcggtggcggtggtgtgattatcggggttggggcaatcggctttgatgtacacccgtttagtattattgcgcaactcatcattaagccggctaatatcattttttgcatcggttaacgcctttgtgtgttgtttatccaattctgataagcgggcaagttcttcctgataatgttcaatggcgtcttgatgactgataacacttttcttaagggcgagattatcacccttaagctggctattctcagtgagcaaagcatcaaacttaaatatcagtagcaagcccatcacacccgccacaataatcagcagtacgttccttttcatcgtgggatctcaatatgaggataatcaggaaagcgggtttcaacgggtaaactgggatcacttttccagtttttaccaaaacgtaatgttaccccttcttcatctgccgcttgcttaaatgccattaaaaccggctcaaaaaaatgcgggtgccattccatccctggtttaatcgcagaaggcaaaatatcaatggcatcgcctgttaaatgacggctgtttaatgtttttgaaacgccttttttcacattttctttttgctttttaagtgtgcgaacaccttcaatcactgcaaagtccgccgtagaaatgtctaacgcacgataagcaattttcactaatagcggattaacgccactaagattatttttactgcgctggctaaagataaatttattcaccagagaccttccttaagaatcttttttctaacgcactgaccaatgcagcaccagaccagcccgccataccggcaatagcgccggcaatttcaggttgccactggtaataacttgcaccgaataaaatcaatgcccctgaaaacatagagacaacaatttgtgcaaataagatggcaaagcggaacggttcccctttcactattttattggcataactggcaataccaccaaaaaccgccataccggcaattaataaggcagtaaaccaattcatattatttggatctttatagggcatcttcttcataccttcccccttaaaggggttaatcccaaagttgtaaaatcggtgtggtgctgtgttgttgaggcgtatccggtaactcaatcgcggtgccggtgggtaatattgcccctaattcaaccagccccggattggcttctaatacttgttcaatcatgccggatgactgaccaaagtaacgccaacaaatatcatcgacggtatccccttgttgggtataaatccgcatcagataagctccaccgtgttatgggtttcccctttgatacgttgtaacgcccacttgccatcacgccacacttcatcaatagccggcgtcatggtgtcggcttttttattaccttgtgcggtagtatcaatatcgcgataacgttcgattaaactggcctttgcaaaacagaacaccgctcgctgatataaaatcatcaattcactttcaccgttaatctgttcggcaggcacctcttttaatgttttcgcagcttgaccaatacgccactgatacaattcacgattcacttcaatcatggcgttcaataacgtgcttttcagccgttccggtgtcacagtgccatcgacgcgagtttgcaattgaaaatcacgagtttgaatatcagggaaaaagccattgtttttaatggtttcgtctttttgtgacacagggttagcagaaacataatccataagaaaaccttaaaataggtgggcggtggacgaaagaaagcaaattgctttttccgtgccgccctgacgtggtgtcactatgctttttcagcgtcacgctgggctttaagcactttatcgagttgttttaattcggttttcacaccgatattcatgtttaactctaaggctcgacttaatacgcagtagctttcttgtgggcgattattatcgcgtagcactaaccctaagattttgtagagttttgcccttacttcatcaggcatatcttcatcatcggtcaaagcacgtgtacgctctaatgttgccaatgaaaccggtgatttcacggcatacgctcgcatggcagaatcggcgatttcttcggcaatcacggtgcccgtggtgcggttcacaccggggatcactaaacggttagctaatgcgtaaacggcaatatctaacgccccctcataatcccccgcatcaattttccacagcaaaatcgtcattaagacatcatcttgcacaccgctaccaccggacaatgccccatcaacccacggctgataattggctaatatcttgcgcttataagcttctttgcgttcgcgtgactgaaaatgttttagctcttttttatctgtcgcaagacgtaacagcatcatgtgatagccctgtgtattgcggctaacatgcccacccaattggctggactgttgcgcgctaaggctcatgcggtgtttttcccacggagataatgccattatttcgcctttttattttcagttggtgtttcttctgttactgctttgtcgtctttgacgacttcattttcagaagctcccccctctttttttgtttctggctgtgtctcttttacatcttcaaaaacaatattttcgaccagtgccacaccgcgaaaatcttcaaccacaaaatcttcattcactgactcgtagttttcgatgcgatcgcgttttgggttatctaacacttgacgacgacgagaatccgcaaggaaataaatcgacaagttatcaaggcgagtgataaaaaatgcattgccaggaaagaacggcgcacgtacagcaggcaaaccgccgatacgtttctggctgataatggtatctgccgccagtttttcactgttatcttggtctttattaaccagtggaaaatatttatctgctaataatttacggccacaaatcacaacaagaccggtatcgtcctgatattcaggatcaatcgcagtatcgaccgtatcttgcactaatgcatcaagattttgataagcttgccctttaccgaccagaataggctgggctgtggttgcgccgtctttcgtttcactgcccatcacatgctctggtgcacgctcacggactttttgtaaccagcctgaattcacatcttgcagtaaggggtattttgtccgatcagaattatcggcgcggtgcgtaccattaaaaccaatcataatgcggtctaatgcctgacggcgaataatcgcatcgcggatacgggtttgaaagtcggtaaacttcgcccacatatcaattttggcgtaatcaaggtgggtgtcgtaattggttttctggcaatgatagctatttttggtcagcttaatcggatcacttgtttcgcgctcttttgctgttgtatcggtagtgcctgcgatagttgagccgatacctaaaccgatggcctcacccacttgctcatcaacgggcacgatattaacgtgtgttaaaaattctgctgactgctgaatattggtttccagcgtttgcgcggcagacggttcaatttgaacctttgtatcactaaacgcttgcgcgctaacaccgtaaattttaccgagttgcgtgaggtacgcattaaatttaaaacgagtttcttttttcatggtctgttcactaccttagcaatccgtcagcacttcgctattattttcgccacccgtggccggcggacgatgtgagaacgaggcgtctgtattttcaaattgggtttttaattccgtgagttgttgcgtaagtgcttttaccgcttcgctttggtcggcgttttttaatgcggtaatttctgcagaaagggtttgtacttcttgggcgcacagctccaccgcctgatgcacatcggtaaatcgcgcatcatcactgtgttgttttttagaaaacatctctttaataatgctaaaaagccctggcttctcgctctgcgggttttcatcaataaattcaaagtgattttcttctgcagcagtaaaaacgttatctttgctttgtttgcgctctgaaagcgggctactttgtgcattagcactaaattgcagcatttcagtgcctaaactcgcggggttatcggtaaccgccagcccgactaaatacgcttcgccggtatctgaaaaactcgggtcaatttcaacagaggtatagactttttgacgttttttattgagttcaattaaatcaggcgtcggattgatcacaccatacagtgccaacttacccgccagcgccccttctttaatttcctcggtatacaccgactccacatcaccaaagcgtggtgcccatgaatagttatagtgatcgatattgactcgcgcaccataaaccgtgggatcaaagtttttcgcgatttgggttaaccattcccgatcaactcgacgcccgtccgttgtcgccccttcaacacaaagacgaaccggttttgatttcttcgacatgcactactccagactgcatccgtttattcgttggtctgtatgttgtcggttaaaaggggcgttaaacaatggataaggtttgtctgagatatggcacaacgggaataaagcgaataggtgatcagcggtcaatagactagccgtaacttaagcaagaaatcgtgattgtgcaatgactattacagaaacatttgataaccgaaaaaaagcaatgcacctgtattttgccggttaccgcattgctcgcatagcggaatcgctaggcgaaaaggcgtccacgattcacagttggaaacgccgcgataattgggatgaaatcagccctaccgaacgcgcagagctaaccgttgaggcacgttattgcaatctaattttaaaagagagcaaagaaggcaaagattttaaagaaatcgacttgttaggacgtcaactcgaacgcatggcgcggatcagaaaatatcaaaacggcggtaatgaaacggaccttaatcctaagattgccaaccgcaacaaaggcgaacgccgtcagccagagaaaaacttcttttcagaagaacaaattgaaaaactggaagatatctttcgcaatacgttgtttgaatatcaaaaggtgtggtatcgcgccggtcatcaccgtatccgcaatattttaaaatcccgtcaaatcggcgcaacattctactttgctcgagaagcctttattgatgccctgaccaccggacgtaatcaggttttcctctccgccagtaaagcgcaagcctatatgttccgtgaatacattatcaaaatggcattggaggttgatgttgaattaaaaggcgacccattgatgttaagcaacggtgcaacgctctatttccttggcactaatgcacgcacagcacaaagttatcacggtaatttatatctggatgaaaccttttggatcccgaaatttcaggagttacgcaaagtgacttcgggtatggcgatacaaaaacattggcgacaaacctacttttcaacaccatcaaccatgagccatgaagcctatccgttttggtcgggtaagttgtataaccgcggacgcaaaaaagaagatcgcgttgatattgatatctcacatgaagccttagtcaatggacgtttatgtgaagatgggcaatggcgacaaatcgtcaatattgaagatgcactacgaggcggttgtgatttattcgatttagagcaactcaaaaaagagtatagcccggacgaatataacaacctgttaatgtgtcactttatggatgatatcgaatccctattcaactttaacatgatgcaaaactgcatggtggacagttgggaagtgtgggacgacattcaaccgttagcgctgcgcccttatggttatgatccggtttgggtaggttacgaccccagcaaaggcggtgaaaatggtgatagtgccggttgtgtggttatcgcgccgccgaaagtacccggaggaaaattccgcatattagaacgccatcaatggcgtggtatggattttcgcgcacaagctgacgccattaaaaaaatcaccgaacgtttctatgtggaatatatgggtattgataccaccggcttaggacatggggtttatcagaatgttatccagtttttccctgctgcgcgtgagtttatttataacccgaatgtcaaaaatgccttagtcattaaagcctatgacgtgattagtcacgggcgcttagagttcgatgcgcagtgcgttgatatcattcaatcctttacatccattcgtcgtaccaccaccggaagcggtaaccgcccaacctatgaggcctcgcgcagtgaagaaagcggacacgctgaccttgcatgggcaacgatgcatgcccttttcaacgaaccattaaccggcaccaccgagaacagtaataacattgtggagatttattgatgagccgtaaaaataaaaaacgttttaaaacacaacaaacggcaaccgccaataacagcatggaagcctttacttttggtgagcccgttccggtgttagataaacgagaaatctttgattatctggagtgtgcgcaaattgataattggtatgagccaccggttagctttgatgggttatcaaaactgtttcgtgcggcgacgcatcatagcagtgcaatttatgtcaaacgtaatattttagtcagcacatttcagcctaaccgttttctctctaagttagactttagccgatttgctctcgacttcttaacctttggcaatgcctaccttgaacgtcgtaataatatggtgggtaacttattaaaactcacccccgttctcgccaaatatacccgccgtggtgttgctgatgatagctattggtttgtgcgctatggctatgactcaaagccgtatgaatttaagcccggtagtgtatttcagttatacgaacccgatttaaatcaagagctatacgggttaccagaatatctggcctccaccatgtcagtgctactgaatgaagcatctaccctctttcgccttaagtattatcgcaacggaagtcatgccggatttattttatacgtcagtgacgcctcacaaaaccaaagtgatattgataaaatccgtaacgcaatgcaaaactcaaaaggccccggtaatttccgcaacctgtttatccacgcgccgaacggcaaaaaagacggagtgcaagttattccattaagtgagattgcggcaaaagatgaatttctcaatatcaagaatgtcagccgtgacgatatgttagcggcacaccgcgtaccgcctcaaatgatggggatcattccacagaataccggtggctttggtgacgtagaaaaagcggcaaaggttttctttcgtaatgagttggcaccactgcaaagcaagatattacagattaatgattggctaggtgaagaagtgattaagtttgataagtacacattagatgatgaataacttcaccacacaaagaacaataccgccgacactggcggtattttttacctgtaaggtataagtatcggtctgactaataataatagtgacccaattttattataccgtttacaccctgataaggcgaatccgcctaatttttaccctctcaaacctgtattaaatgcgcctacaatccattttaagcgcacgtaatttatttgatatctaggtaactttttcttgttttaatcgctctacgcgccggaaatttgcgaggaataatgtttttaaccccctcaaaacgcaatcgtgaccccgccacgcccgcgcactaaatagaccgctttttatgcacctgcatgagtgtcacgaaagcccgtgatatctggcgccttcgaataactttgatccttttttgatcttgcactttttacactttgctgcatgattttttcagtaactctcttttgatcaagctaatcgtagatttagtatctattgctggtaattaatcactaaaaattcacattatttatttaattaacaatataaatgacactcaatataaggcacttaaaaaaatctccgcagtttattcaactagcggagatttttattaacgctaaagttagttacaagccaatttatacctgtatgcagataatgaaaccacattaggttcaacattgttagtcatagttggtgatatcttgaaagaaacatcatcaactagctcttgtaacatttctattcttacttgtaacttactagctaataactctgcatcaaaatcaacttcattgagcaaaacctgtaatgcattataaaaaaactcaggtttttcatgaggtattaaacagtcctctttctcatcaatagcttcgcctttacgttttagcccaaaaaatgctgttttatactgcgcatccgtaagtaaagataattgatgagcccgataaattatagctgctttactaaccttccattcaagcttaaattgacttaatcctttccagtcaattctgccacctattggcttaggaaaatatttagccattgaggatctaggcaataataacgcagaagcaaatctattagcttgagattccgttatcctatctcctgttgaaactccgccatgaatgattaaatgagcaacttcatgtgctatatcaaatcgttgcctacatggtgactttttcgccgtattcctcacaataaaaggtctatcaagcggaattgataatgcatcaacatcatcagatacagaatcaaaagcagtaacaaaggcacctaatttttcagccaatcgtgtcatattatctatggggccaaaacctaatccccattctatacgacaccattcagcggctttctctatatcatcttgagtatgaacctttatttcaggaaactttacaggtggcaaatttaaatatttttcaaaaacactaatcaaacgcctatacaattcagctttcgctaatgtggatagcttcgttgatactctagttgcgcttcttttacgaaaatgaacaatctcctcatttataggagactgctcttcattattaaaaaattcaggcaatacttgcagaacaaaggctaattcatcagtaagctcttttgttggtaatgcatatcctgattccaagcgctgtatatactgccgagttttgccaactcgctcagctacttgttcaagagatagctcgtgatacagacgagccagtcgcaaattagagccattaaacacgattcacctactatttattattacgttttacatcttcatcagccactattggtctgattggatctaaattgatagctactgaagttggtttttcatcatcagttgaatgaagtactgagatcctattttcaccataagtccatttagatacaatctcttctaatgcattgcatccaagaaaatgaactcttgcatcttctccttcaaattctggtttttctataacaaatctgtgtattgttggatcagatagctctgttttccataactggtcaacttgatttctacgaaaataacctggtttttttggattttctggatcatcagcaaaaaaccgaacaggaataccatcaatattgaaagtaacgtccatgcctgggtttgttagggataaccactcatattggccactcatacataatttaatcaaaagctgacgctgacgaccaaaggtacaagttccttttgtataattatcatctaaaggcgttgacaattgttcgtatgtttgatctagaacacgcaacagctcttcagcaataatagttaaacgttcttctgttaattggggaaaacattcccacggtgctttgtaatccgccattatcgtctctcgtaagtgcataatttgaaatttgtcaactttgatattggtgcaaaattgtcattttgtcaactttataatagctacacttttttagttgtaattttattctatctttcttcactcataccaataaatttgcggtatttctctgaaataaaaaaatatagcccaataaaaatataaagaggccataacgttgaataatctatcgcttcacccaaactatatttatcgtgataactctttttagatttaatagtcctgtatataaaaagagttactgataccaataaatagaacaaaattaaatagttaatcatttatccctctcaatttattaaccttagccattaccctatctcgtgtatttgaaatatttttctgcttcacttcttcaaaattaactttttcacttttcgttgatgaaatttgaatcttcccgctctcaaaccaaatcacttcatcgccataactcaggcgcagaccattcatcaccattgaccacattgagtctggtggtaaatccaatcccattttttcggcaaaggctttaaattcaggtatcaagcgttcctgattttcacttaatgacaccgttgaaattattcgctgactctttttatgctctaaaacctcgccaaatgatttctcccaatcgctatattgtgaacgtaggtcaaaaacatcaggctcagaaatcccccatacgggcgattttaagctcctttcgtgtgaatttttaatatcgggtgaactgcccgatccacagttattgacaggactccgaggcgcgctgatcgcgctttttaaagtcaaaaccctccccgtttctgacttacgcttatgctcaattgcctcaatatcctgcttagatttacgaactaaacgatactgacgctcacgcgtttttactaaatcgctactttttatcggtgaatataatccgattattcgcatcacttcttcatcataagaattcggctcatcggcaacagtacgagcaactaataacgtttgtaggttacgcttaacgttaggccctccttgatgctcaatataagcggcgaaatctcccgcatcggcagacgctcttactttttccgctatatcacccaacttatcagcgatactcacaccacgaatacgacgacactcacgccatacgcctttagacggtaagccaaacatgtgaaattgaggaatacgccaagtagacgcccacgcagtaacggctgatgcaacctcggttaataactctcccgattcgtcatcaacttcaccctctaacgcataaccgtcgatattttttgaaatatatttagcgagataacccgtagcaccgcctttatttaaatgctttgcttcaaaacggtgtttctttgcgccccgttcttcgccgtcttcttcaagggcatacttacgcatgatctcaatcgctgatgcacgttgagatttatccagaaacatcatcatatgccaatgtggtgtagcgtcatgatgtggctcaacaactctgatcccgtaatagttaatgcctttatctttaaaagcagtgcgaattttcgcccaaattttcactaaataacgttgaccatctttcggagtgtatgcgctgttattccatttctcgttaatgagaacttttttctttttctcatctttagaaacattaatttgcttggtgggatggtattttgaaggcgtggttaacgtaataaataaaccaatatcacctctttcttcggcaactttttgaatacctgcggcttgcgccatcaattccatacggcgaattttagggttagcgatactcgctaatactttttccattaaatcgaagcgatcacccgattcaacgtcttgaatatccatcatttcaagataattcatattcgctaaacgttgcgatctgacttcacgaaccgcatttttactggcgtaaggtgtcttatctgaattcacatcaccaaaggcaatatgcaaagactcacgccaacgttgacgatgagcttttaactttttcagccaccaattttcatctgttaaccggtttaatccggacaacgcattttctggtgttaattttcctttttgagcttttccccaaaacaacggtgttacatgtaaataggtaattaactctcctaattgatgataaatagggttaatcacttttaggttaagtaacacctcacgatcaccgttattttcagcaattgcctgatcagccaattcatcgaataagttgtcacacgcgttcgcaaatgacttcgccatatgacgcaatattttgtcatgcgcatcgggcaagcgattaaagaacatggcttgatcaaaatctctatctaacaaaaattgacgtttatctttcgctaaaccatagcgcgcattaacggcttgcaaacgctgatagacgcttttatggaacttaaagaccagccagttatgaacttctttcggcgttttctcttttttaagatgttcgatgtacttaaataagcgagatttaagaaagcgaggcagtttttcaatatcgaataaaatcgcttgcccctgagccaattgctcacgggtaagcggtctttcataaacaactggctcatgctgtttcccattccaccaatatgtccattgcatatcagcaggataggaaacaggaggctgagaaaaatcaatcagacggctagccattaccgcacaccgcctaaatgcttcggatcaataatttcaatggctgtttcgcacagtttagcaacgtgagtcattacctctatcaattcagagatagacttaatttctgcgcaaataacacgactcacatgcgcaccaacaacgccagccgtcacatttactgcagagtcataccacgcaatcacttcacggcgcacacgaccatcaataacagtgacttcgattaatccaaattgttttttccaataaacgatagcaaaacgagtgccagtaatatgcaccccattttttggatcttgaatatcgacatagccctgttccatcagcacacctccggcaaaacggcgataatttcttttgctgattggcgatttccatttgcagaaatagaacgaggtgcatcaatctcgtgaataataaaaccgagatcggcatacagctctttggcgtgaatggaattagaggcagtaatcgggttaccttgtgattgatttaatgcctttaatgcttgagctaactcaatttgctgagcgtgagtaaaatccgtgtgatgatatttagtaaaactaccttcatctcccatatatggaggatcacaataaacaccatcaccgaaatcaacgagtgacaaagtatcttgccattctaaacaggcgataatggcattaacggctttctcagcgaattgataaatttctttttctggaaaataaacatttttatattttccaaatggtacgttaaattcatcttttgcgttatatcggcataacccattaaagcaatggcgatttaaatataaaaatctagctgattgtttattagttaatactgcatcaagctcctgcttacctaaattaaataactttctagcttggtaataactttcttcattgttttgttgtttccaatcataaagatcactacaagccataacatcaggatttttagaaacggaacgatataaattaattaaatcctgattggcatcagcaattaaatattcttcatattccgtattcatcataacagcacaagaacccgcaaacggctcaactaagcgccttgcttttggcaaatgtggaattaatttatccatgatgcgggcttttgagccagcccatttcagaatggttttattcgccatttcacacactccgataatgcttagatttcagctcatacaccgtttggcaatctgcacagcgagtgcatcccattaccgcaatacggcgcttttcgggtatttcacgaccgcaatcttcacattcaaacgctgatacacctatgtaacgccctgttactgcttttatttgtttatcaagcaataactgtgattgttcgcaggctaaatccatttctttagacataattccattcctgcgcttgatgttcgatagactcggcttcaccttctaataattgaaatacttgtgaaggctccattcgttcacttagtgcttttgatgctaatttgcgtaaacgggcagaaaaaagaaccgcccgagattttctttcatcttctcgaacggctttaattaaatcggttacatcactttctttagacataatcagacctctgataatcaaatataaaaagtcctgacaaataaatgtcatttattttttaggtgtaattaaataggcattgctaatttattcgggattaatgcgctcaatacttttatttgatgaagtgcattaatgatttttattttatctttcctctttaataataaataatctattccgttcttttctttttctatctcagcaaggtaataaatcatctgatatatacgattattttcatttcttaaataatcaagaaactcaccaatcaaaatatcatcactatttttatttaacttacttaataaatcagccctaacttcggctgttttattcataccactgacgcgctcatcaaatgaaagaccatcattgcgataatgctttaccactttagactgataaaaatcatcattgccttgtagttgctctcttgcttgaataagctccgcggtattcataacaacacctagatagaaactttcacaaaaaacgaaacgataacaatggcacataaagccagtgttgctttatccgcttttgaatactttttacttttattagtaaaagattcactgcttaatttatatttgtttctttgcttaattaattggttcattgaatgtcaccttttaataagtcgatatatttagttgcttccgccattgcatcaaacttaccgaatgactgatcatctaaccaaacgtgataacgagttatcggtgttactgcttttcttggcagtttaataatggtgaaaccgcgatacataaaactatgctctgtaatttgctttactatcaccttcatcatccttgttattgtggttcacccattcctaaccatatcagccagccgtcacgtaattctttaggcattcttttacgtgccatacgcaagcctttattccaatcggttacatcgatgtaatactcaccgcgggaattatctgggtgcttaacttctacataaggcaatttcccatccttacgcatatcagacacagctttgggtgttttaccgatatagccggcaaattttgtctcagtgacaaattctgaaccaatattatgaatttcgatttctttcgacatctggtaacctcttattaatgagcgccctttggcgctcttttacgccttgtagctatacgtgggtgtttcgtattaaataaaatttagaggatccgcaaaattatgtcaagttcgaaaaatgaaaagctaaaactaataagagaatcagaaagattaaaactaaaggaaatgtctgatttaacagggattaattaccatacatatcatggatatgaatcagggaaaatgaatatgtctttagaagcagcaacaaaactattttcaattccaagatttagaaaatatatgacttggtttatgtttgatgaaatcaatcctgatgctgggcaaatcgcaccggcactcgcacacagtgggcaagacaacacgcaatcatcccactcagacaagaaaattggataacaatacatcaagcattttgtgaatttattgattcacaaagcctttctaccattggagagctttcttatgacaattaagaaacttgaagatggtcgatatgaagtggacattagaccgactggacgtaatggaaaacggatcagacggaaatttaataaaaaacatgaagccattgcctttgaacgttatgtaatggccaatcacagcaaaaaagaatgggggacaaaattaaaagacattcgcccattagatgaactcgttgagctatggtggaacatgttcggtaaacatagcgagaacggaaaatctaactacaacaatgcaatgcgtgtctgtaagggtatgcatagtagcaatgtatctcaagttacatcaaaaagtatctcattttatcaaaatgagcgttttgctaaggggataaaaccctccactattaatcgagaactgtatgctatacgaggtatattttctcaattaattaaaatgggattatatgaggctgaaaatccctttattgaggccaagaaattaaaaataaatgcgagtgagatgtcttacttaacccttgatgaaacccgaaaactactcgctaatctggaaggtgattattataacattgccgtattttgtttaagtacgggggctagatggggcgaagcaatgaaactgaaacgagagcatatcattgaaaacaaagtgcgttttacttacactaaaacaagaaaagcgcgcattgtccctatatcgaaagaactctgcgatcaaatatgcaaaggaaaaaaagacctcctattttcctccgtttcatatcaagtatttagaaaaatactaaaaagtgtaaaaccttctttgcccgacggacaagctacacatgtgttgcgtcatactttcgctacgcatttcatgatcaacggcggtagcatcatcacattacaaagaattctagggcatgccagtttaaaacaaacgatgacctatgctcattttgcacccgatttcttacaagatgcgattgtaaacaatccattaaaaggaggtctcagtttatagataaaattgtccacagagcgaccacacttggtcgcttttcatcattttttagcgcttttaagctcataattaacttattatttttaagttacttactgaaaattaagcaataaaaaagccatcttgcgatggcttttttcatatagcgtatttatcgtgattcgataattattttcccggacgcatcgctgggaataaaataacatcacgaatagtatgactattggtaaatagcattaccatacggtcaataccaatacctaaacctgctgtaggtggtaacccatgctctaatgcagtgatatagtcatgatcaaagaacatggcttcatcgtcacccgcttctttttgacgaacttgctcttcaaaacgctccgcttgatcttgcgcatcattaagctcagagaaaccattaccgatttcacgaccaccaataaagaactcaaagcgatcggtaataaatggattatcatcattacggcgagccagtggtgaaacttctgctggatattcaatgataaaagttggctggatcaaatgactttcagctacttcttcaaaaatttcacattgaacacggcctaacccccaactcttttcaatcttaataccaatagattgagcaatagcaacggctttatccatatcatctagatcagccatattggtttctggacgatatttgcaaatagcttctttcatggtcagtttttcaaacggtttaccgaaatcaaactcttcatcaccatatttgacgatagtcgaacctaatacatcttgagttaatgtacggaataactcttcagtcaattcgataagatcacgataatcagcataagccatatagagttccatcattgtgaactcagggttatgacgtggtgatacaccttcattacggaagttacggttgatttcaaaaacgcgatcaaacccaccaacaactaaacgttttaaatataattcaggtgcaatacgtagatacatatcaatatctagcgcgttatggtgagtgataaacggacgtgcacttgctccacctgggatagtttgcatcatcggtgtttctacttccataaagcctttattcaccataaattggcgaatagcagacatgattttcgagcggatcttaaaagtattacgtgaattttcattagagatcaggtctaaataacgctgacgataacgtgtctcttggtcagctagaccgtggaatttatcaggtaacggacgtagtgctttagtcagtaaacgtaactcagtacaatgaatactcagttcgcctgttttggttttaaatacacggccacggccacctaaaatatcaccgagatcccattttttaaactgctcgttataaacgccttcaggcagatcatcacgagagacataaagctggatacggccgcccatgtcttgcaatgtagcgaaagatgctttccccataatacggcgagtcatcatacgacctgcaatagcaacttccacattagcagcgtctaactcttctgcactcattgcatcatatttttgatgtaattcgtcagacatggcatctctgcggaaatcatttgggaatgcgttaccattatcacgtaaagctgataatttttcgcggcgagtttgcagttcgttatttaaatcaggtgcctgctccgcaccttgttgctgttgcgacatgtttttcctcacaggcccgcttttaagctagcttcaataaatttatcgagatcaccatctaacactgcttgtgtattacgcgtttccacaccagtgcgtaaatctttaattcgtgaatcatctagaacataagagcggatttggctaccccagccaatatctgacttattatcttccatcacttgcttatctgcatttttcttttgcatttccagttcatacaacttcgctttcatctgtttcattgcctgatctttgttcttatgctgagagcgatcattttggcattgtgtgacaagcccagtaggaacgtgggtaatacgtaccgcagattctgttttattaacgtgctgaccaccagcgcctgatgcgcggtaaacgtcgatacgcagatcggctgggttgatttcaatatcaatattgtcatcaacttcagggtaaacaaaagcagagctaaatgaagtatggcgacgtccgcctgagtcaaatgggcttttacgcactaaacggtgaaccccggtttctgtacgtagccaaccataggcatattctcctatgattttgattgttgctgattttaaacctgcaacatcaccgtcagactcttcaataatttctgttttaaagcctctagattcagcccaacgtaagtacatacgcattagcatacttgcccaatcttgtgcttctgtaccgccagagcctgcttgtaaatcaagatagcaatcagcactgtcatattcaccagagaacatacgacggaactctaattgctcaagctttttgtttaatccttctaactcagcaactgcttcgttaaatgtttcttcatcatcggcttcaacagcaaggtcaagtaaaccagaaacatcttctagtccttgttcgagttggtcgattgtttctacaatagcttcaagagatgagcgttcttttcctaacgcctgcgccttttcaggctcattccacacgtcaggttgctctaattctgcgttgacttcttctaaacgctctttcttggcatcatagtcaaagataccccctgaggacttgagtccgctcagcgacttcttcaattttgtgttttactggattgatttcaaacatactttttcgtcttaacgttgtttttaaaaacaattggaataaattttgaaccgcatattgtaacggatctcagcgcgggtttatagcatttatatacaattgtctatcggattattgtgctcataacagcgcgctgcccaatacaaccataaaatgacttatctatcgcgattagcaaggccaaatatgctccaccagcagttgtgcattgcgctgtcctctaaattcattgacgtctaatcggtaagcaagctcaaccgttttaatactgttatccggccatatattaacatcaacattaaatgcaatagcatcaatcattacatggctatttatcggttgaagcatcatttttaaatgtttgcttcccacaatacgttgctgtagtaaggtgaatttgccatcgaaaagtggctcaggaaaggcttgtccccaaggccctgcttctcttaacatttccgcaataggtaaagataactgactgtcgcttaactcgccgtctgttaaaatcacgccttgtaattgttcagcagaaactaattccgccataagtgccgaaaagtgacgctgaaaaagtggaaatttatcttcttccagagatagtccggccgccatcgcatggccaccaaacttcaccattaatcccggatttaacgtattcaaacgttctaatgcatctcgcaaatgtacaccatgaatagagcgtcctgagccttttagtaaaccatcaccgcttggggcaaaagcaatcactgggcgatgcagtttctctttaattcgtgaggcgagaatgccaaccacaccttgatgccactgtggatgataaatagctaatccattcggtaagtcatcttgggtagtaataaattggcgaaagattgtcgacgcttcttcttgcattcccgcttctatttcacgacgagtctgatttaatccatccagttcattggcaatttcacgggcgacaccaatatcattagttaacagtaaagcaacgccaacagacatatcatcaagacgccctgccgcattaagtcttggccctaatgcaaaacctaagtcactgctgactaattgtgacaacgttttacgtgaaacttccgtcaaggctttgatccctgcacagcaacgtcctgcacgaatacggcgtaatccctcataaacaaaaatacgattattttcatcaagaggaaccacatcagcaaccgtgcctaatgcgactaaatcaaggtaatcggccatattggggcgagctaatccctgtgctgtaaaccaaccttgtttttctaattcagctcttaatgcggtcattaaatagaaagtgacaccgacacccgctaatgatttcgacaaaaaggcacaatccgctaaattaggattgataattgcatcagcttgaggaagggagtgacccggcaaatggtgatcagtaaccaatacacggataccatattcatgagcaacatcaacaccttcaaaagaggagatcccattatcaaccgtaataatcagatctacgcctttcttcgccacatcatgaaccacttgagggctaagtccataaccatcatcaaaacgattaggaatatggtaacttacttgctgaaatcccatttgccgtaacgctttaatagcaagagctgtactggttgcaccgtcggcatcaaaatcccctacaataacgatccgcgattgcagctttaatgcctcaactaataaagagatagcaacatcaataccgtttaaatcttgataatgcaataagccctttaacgagcgctcgagctgagtttcagaggtaatacctcgattggcataaatttgccgtaataagggatcgaggctttctggcaatgctgttgctttcgccacacgccgacgtaatgtcggttcaatagtaaccataaaacgctatcacttctcttttttatttaataattcaagtagattagtcgccgatatatatccgccataaatactcgcatcaggtaatacaatcgcaggcgtaccttgaatgcccatcatagtgccaagtttaaaatgctcattgatattaatttttttacagtcatcaatcgcaataattttgtcacctttaaacgcactatcgagtgattttttaggaaaaccgctacaccatacggcattcatctgttgactgaccacattatttttcaccccgttacgaggaaaagccaaataacgtaccgtgacaccttgtttatttagctctggtacttcttgatgcaatttttggcaataagggcaactaatatcggtaaaaacagtgatcacatatttttcattagcagccttataaacaatcatttcatttttaagtgaatcaatttttttcatgatcacttgattagcgatactgacaggctcctcaccattaatattataaatcggccctgctgtaaggtatttcccatcatcagtaatataaaaaatgcctttatcagaaagcactgcatttaaacccactatcggtgtcggttgaatgctctctgcttttatctgcatttttgccagttgcgctttaatagcagcgttatctgcaaacactggcattgacaccatactgaataaaatgggtaaccagagtaatttctttttcatttgaattcctatttaacaccagccattcggcggttatccccttgggtgatgttgctgatgaagcacttttaagcgctctgtagcaacatgggtataaatctgtgttgtagagaggtcactgtgccccaataacatctgtacaacacgcaagtctgctccatgatttaatagatgtgttgcaaaggcatgccgcaacacatggggtgataatttctctgaatcaattccggcgatcaccgcgtaatgttttatacgatgccaaaatgtttgtcgcgtcattttttggcctcttaagcttggaaacacaatatcatcggttttcccttgcataagggctggtctaccatattgcagatattgttctaaccagtaaatagcttcttcacctaaaggaactaatcgttctttatcgcccttacctatcacacgtaacaccccttgccgtaagctaatatcagataaagacaatcctactagctcagaaacccgtaatccacaggcataaagaacctcaagcatcgctttgtcgcgtaattctattggctcatcaatacaaggagcactaagtaaattttctacttgctgttcacttaggtctttgggtaaacgtttgggtaatttaggtgtagaaagcaaagcgctgggatcatcttggcgtaatttctcacgataaagatattggaaaaaccgacgtaaggtacttaacagtcgtgccgcactggttgctttatagccctcatccaaacgagtggcaagaaaagcgtgtaaatctaacgtcgtcaccgataaccaattgagtttttgtgtgaccagccactggcttaacgcctgtaaatctaaacgataagcgctgagtgtattcgcagataacccttgctctagccaaatactatcgagaaattgttctatgataacgtcattatcttcttggttattatctgttgtcgtttgtgtcgataacttggtctgggtcacgggtttgctctctcttctttacgttgttacttgtacattatgcctcatagaaaaagttttctggtacaatagtgacctttattagcaaaaatatcctaaaaatctttatgaaaattggtctattttacggttccagcacctgttataccgaaatggcggcagagaaaattcgtgacattctcggtgaagagtttattgatcttcataatgttcaagagtgcgatattactctgatgcaagagtatgacattcttattttaggtattccaacctgggactttggtgagatccaagaagattggctcgcaatttgggaaacgctaccaacattagatctcaaagataaactcgttgctatgtatggaatgggtgatcaaattgattatggtgaatggtttttagatgcattaggtatgctctaccaccatttactgccaagtggtgttaaatttatcggtttttggcctattgaagggtatgaatttaccagtcctaaaccacttactgatgatggtaaacattttgtcgggctcgcattagatgaggtgaatcaatttgaagaaagtgatgaacgtttatcacagtggtgtatgcaaattttacgagaaatagaagaaaacttgtaaatcgcaatcaatctattgcttcaggttatctaccgcaaggtaacacttttaaccttagtcaatcagtaagcattctaacggtttatatacatacccagaattaaatatctgggtattgcatcagcagttgtgaaaaatttcgccactcattttccggcatactatcaaaagcaacccatagcgtgatttgcttattatttaagatagaatctaacgttatttttgcaccaaatcggctgatccacggttgttttgcaatctgccattcatgatatttccattgaatacgattgccattaagcagcactaaatcccctttccttttattgatatttttttggctaaaataccaacctaatataagtaaaagtaacaaaggaacccagatataaataaagccaggtggccaaggatataacagcaatgctatttcaaaaataacgtaaacactagttgaaaataactgtgtaaaccaagaaactgttaaatgtgatttccataaagtcacgagtgatattagctcctgctttaatatcttattattacaacaagatatcgtcgtcgttttttaatagcataactgatttttgtaaaaaaaggagaatataaaaaataaaatgacgatcctctattttttctttgaaatgccacgtaaaattattgtcactaagatttaatattacctcattaaaattttctattcttcgttttttacttactaaaacgcccttattcatttaatgaataagggcgtgatacttagtacttcaggctttatttaatgcacttggttttatattctatttttattagtactaatacttattaacaatttcagccatacgaattctattacgctcttgaattaactttaccatgtaataaagatcttcatcatcagggcggccgtggttcatcaaccaattaaataaatcaggatcagcacattcaagtaaacgaacaaagagccttttgtcgtcatcagagagtgtgtcgtactcgttttcgaaaaaaggcatgatagaaatatctagttcacgcattccacggcgacatgcccaatttattcgtgctttattttctatatcgatagtcatattctgctctttaatatgttcacttcaagaaataccactatttcttcctgccttgatgatagtcttatcgcaccctttttaacatcaaaatgatcacaatttgtcgctttcgtccaatagcaacgctttgaagcatcaataaattgttatgcacaaaattctttctgtgcgctgaaaataataatgacttgcattgtcttgtgactcttttaccataaacagtgtatcggattaactacatagcgggtgatgtcatgactcaaaattctactcagacaaaacgccctcatgccgcaatcaatttaccactcaccttgatctctttagatgattggtcattgataactgcaacaggggctgatagtgaaaaatacttacaaggccaactaacagcggatattgccgcattaccgactacagagcacactttagccgctcattgtgaagctaaagggaaaatgtggagtacattgcgcattttccatcaacaagcaggatttgcttatatattgcggaaaaatgttgctgaaaaacaacttactgagcttaaaaaatacgccgtattttcaaaagtgacttttactgaaaatacagatgcggtgttattaggacttgcggggcaaggcgcggcacaagccttagcggaattcttccctgagatcccccgtaaagccaatgaagtggttaatcaccaaaatagctacttactgcaactcccgttacctacagagcgctttttaattgttacagatgaagagactgccaaaaaactagccacgacattgcccgcagaaaccagtgatagtgaccagtggttagcccttgatatcgaggcgggttatcccattattgatacccctaatatcgaacaattcttaccacaagcgactaacttacaagcattaccattaagtatttgctttaaaaaaggttgctatacaggtcaagaaatggtgtctcgtgccaaattcagaggcgcaaataaacgtgctatgtatctgttatcaggtggcgcagcacaattgcccgacattggcggtagcgttgagtggcaattaggtgaagataaatggcgcaaaacaggcacggtattaagtgcggttcgtatggccgataacacgattatcgccgaagtggtgatgaataatgatatggatgctgacagcgtatttcgtgtccaaggtgataccaccagccgcttaacgattaaacctttgccttactctttagaagatgagtgatagcacttccatatgaacggatttttatgacacaacaaactaatggggcttttggccccttttcagataccatcaattttattattgaactcgataaactcaaacgcgtttaccgcaaaaataatgtattagacaatagccgtgctgaaaataccgctgagcatagttggcactttgctgttgcagcaatgagttttcaaccttatgccggtgatattgatataggtagagcgatccagctagctttagtgcatgatattgtcgaaatcgatgctggtgatgtgatggtttatgatgttgccgctcgtgaagcgattaaagagcaagagcaaaaagcagccagacgtattttttcgttgttacctgcaccacaaagtgaatattttcttaatctctggcttgaatatgatgcagcacaaacccctgagtcacaatttgccaatattttagatcgcgcaatgccaatgttaatgaatctacataacgaagggcaaagctgggttgaaaataatatccgtttagaacaagtgattgcacgaaatctatttatcgaaaaacagtggccagaattttggcaatacctctatcctcaattactagaggcacagaaaaaaggctggttaaaataattttttgctgttcatttgatgatgaccaaaaaaataccgaaggtagattttgaatttaccctcggtattttatttagtaatagcgctaaattaacctttattcataatcacttattggcgcacaagaacaatgcaaatgacgatcaccataaacatcatcaaggcgttttactgccggccaatatttattgcgtttcgttgcttcacttgggaataccgcacattcacggctatagctatgtgaccattcttgcactaattcatactgtgtatgtggtgcattcactagcggattatcatcaatcggccataccccgtcatcgacttgtgcaatttcagcacgaatcgagagtaacgcatcaataaagcggtcaatttcaactttgctttcagattctgttggctcaatcattaatgtccccgcaacagggaatgacatggttggcgcatggaagccgtaatcaattagacgcttcgccacatccatttcactgataccatagttagctttgagtggacgaatatcaataatacattcatgggcaacataaccttccgccccagaatagaggatgtcatagtcatcttttaagcgttgagcaatatagttagcatttaaaatcgctacttggctcgcttgtttaagcccttctgagcccatcatacggatgtacatccagctaataggtaatattgaggcactaccaaactgtgctgctgacacggcaccttgggtcgtaacaccgtccatttccacgacactatgtccaggtacaaatggcgctaaatgtgcttttacgccaataggtcccatacctgggccaccaccgccatgggggatacagaaagttttatgtaagtttaagtgtgatacatcagagccgataaagcctggcgtcgtgatccccacttgcgcattcatattggcgccatcaagataaacctgtccgccatattgatgaatgatctcacaaacttcacgtataccctcttcataaacaccgtgggttgaaggataagtcaccatcacacaagaaagctcagcttggtgcttctctgctttcgcttttaagtctgcaatgtcgatattaccattttcatcacatcccacgacaaccaccgtcatacccgccatatgggctgaagcaggatttgtaccatgggctgagcttggaattaaacagatatggcgatttccttctcctcggctttgatggtaacgacgaatagctaacaagccagcatactccccttgcgcccctgagttaggttgcatacacatcgcatcataacccgttatggcagccaaccaattagatagctgctcaatcattatctggtagccttgcgcttgataaggtgggcagaatgggtgcatttcggtaaattcaggccatgtgatcggcagcatttcagccgcagcattaagcttcatagtacatgagcctaacgggatcattgcttggttaagcgctaaatctttattttctaaacgatgcatatagcgcatcatttcagtttcactgtgataaagatggaagttttcatgggttaacaccgcatctttacgcaacattgccgttggaattgaggtcgatgaagaggctaccaatgcatctaatgtatcaatgtcatcagagaaagctttaccactgataatctcaatcaatctgacaacatcttcgcgagtcgtcacttcacttaaagtgacacctactgcgccaacaatatcggttcgtaaattaatttcagcatctttagcacgttgtaatacacccgctttatccgctgtttcaacggttaaagtatcaaaccatgtctgatggcgtaatgtcatgccattttgaattaaacccgcggctaaaatatccgttaagcgatgaatacgctgagcaatattttttagaccttcaggcccatgatataccgcatacatggcagcaatattggccagtaatacctgtgaagtacaaatattcgagttagctttttcacggcgaatatgctgttcacgagtttgcattgccatacgtaacgctctgttacctgcagcatcacgcgagacaccgataatacgtcctggcatggctcgtttatattcatctcgacaggcaaagaaagcagcatgtggaccaccatatcccattggcaccccaaagcgttgggctgagcctaatacaatatccgctccttgctgccctggagccgttaataacaccagtgccattagatcagccgctacactggtaataatttttcgcgtttttagttcactaatgagctgactataatcatgaatttcaccggttgtgccgacttgctgtaatagcactccaaagacaccttctagctctaacactttttcagctttatcgacaatcacttcaaaaccaaaggtgttagctcgggtttttactacgtctagtgtttggggatgaatatcatcagcgacaaaaaaacgctccgcattttttagtttactaacacgttttgccattgccatagcttcagcggcagcagtagcttcatctaatagcgaagcagaggctaaatccatgccggtataatcaatggttacttgttgaaagttaagtaatgattcaagacgcccttgagaaacttctggctgataaggagtataagcggtataccaacctggattttctagcaaattacgtaaaataacaggaggcaatacagaaggcgcatatcccataccgatataagaggtaaaacgtttatttttacgggctatcgcttttagttctgctaatgcctcttgttcagtagccccccctccgacattaggcggcgttgctaattggatattatcgggaacaatcttttgtgttaattcatttaatgaggagatgccaacaacatcaagcatctctttaatctgttctggcgatgagccaatatggcgacgaataaattcatcacgatattctaattgagttaaagtttgtgtcattgcgggtaattcctgaattcacaataaatggataagctgtttttactgatttgaaaataggctgataaataaaaacgccccgactttttaatgacgaggcgtttatttttactcttcgttttcaactaactcttggtagccagccgcatcaaggagatcgtttaattcgctttcatcttttgcttttatgcgaaataaccatccatccccataaggatcactattaaccagctctggtgaaccatccaactcctcatttactgcaataatttcgccagataatggggcataaatatctgatgcagcttttactgattcagccacagcacaatcatccccaagatcaacttcactgcctacatcaggaagatcaacaaacaccatatcacctaacaactcttgagcatgttcagtgatgccgatagtgtattcgccattgccttcagaacggatccactcatgagattgcgcatattttaattcactaggtatttgactcattgaccgtactctccatttaaaataataatgctttataccaatgctttacctgaacgaacaaaaccaggttttaccacctctaccggtatttcacgattacgcaataaaacaattgcgctatctttaatacctgcgggtactctggctaatgcaatactaaagcccaatgtcggtgaaaatgtgccactagtaataacgccttctcttaattcacctaaatcatcggtaaagtgcacggcactacctgcacgtaacacccctttttctcgcatcaccagaccaaccagtttatctgtgcctgttgcgcgtaatttttctaatgcttctctaccaataaattgacgatcttcgggtaaccaggcaatcgtccatcccatattagcctcaagaggattaatagtttcatccatctcttgaccataaagatccatacccgcttctaaacgtaaagtatctcgagcacctaaccccgcgggcttaacccccactgctaataattttttccaataatcaacggcttgctcttttggcatggcgatttcataacctgcttcaccggtataacctgtcgtcgcgacgaagagatcatcaagttgtacgccatagaaaggcttcatcgctgccactatttggcgatgcgattcacttaataaacgctgtactttttcttgtgcgtgagggccttgtactgcaattaatgctaaatcatcacgtacttgaatatcgacgacataatctttggcatgctcagtgatccacgctaaatctttttcgcgggttgcggagttaaccaccagacgatagaaagtctcatcaaagtagtaaacaatcagatcgtcaatcacaccaccggacgcatttagcataccagtataaagtgctttgcctttttcggtgagtttagcgacatcattcgctaatagataacgtagaaagtctttaacttgcgggccatgtaaatcaacaatcgtcatgtgagatacatcaaacatacctgcatcttgacgcacattatggtgttcatcaatttgagagccataatgcagtggcatcatccaaccatgaaaatcaaccatacgagcaccacaggcgacgtgctcatcatataacggagtctgttttgccattcttccctctttctatttttagtttagatgatccagagaacgcaatttgttaaatataaaattaaacttgattaaaaatcagcgtgttaattacaagcttaagtttatttttaaacattattttaacaaatatgagcaattaacgtacaacgcaaacgatacctttactttgaacttatcactaagagaaaaaataaaccataagttaaaatagggtattacctctaccaatcataatgtagagaaataagtatgcagaatgaatgattgtaattatgcgtatcagccctcatttttagtgaataatgactaaaaaaagggagcaatacaaagaatagactgaaaaaatagctatttttagtgttatttttccagtctgttataaagaaaagtaatgtgaaatggcggttgaattagattttttcagctgaaacagaatttttatgctttagccattctggtaaatcagaaagtcccatcgcctgttcaagtaactttggttttactcctggtaaactatctgctaacgaaagaccgatatcacgcacccactttttaatagggttattaccttcaaataattcgcggaacccttgcatagtcgctaacatgaccgcagcggcatgtttacggcggcgctcaaaacgtcttaaatagagatactcaccaaaatctttaccttctgcttttaaacgacggatttcaccaattaattcagcaacatccataaagccaaggttaaccccttgtccagctaaagggtggatggtatgtgctgcatcacctaataacgctaaccgtggagcggcaaattgacgtgcatagcgacccgttaatggaattgtcatacgttcactgactaattcacactggcctaagcacatatcaaaagtaacacctagcgtacgttcaaatcgcgttttatctgcactcttataatcttcagccaatgagctaggtagcgaccacacaatagaacaagtatgaggatctgcaagaggtaaaaaggctaaaatcccctcaccatgaaacacttggcgcgccacattatcatggggttgttctgtgcgtatggttgcgactaaagcgtgatgttcataatcccaaaaagtcagtggaatatcagcatttttacgcaaccaagaattcgcaccatcggcgccaacaaccagcctagcggttaacatttcaccgtcatttaagctgataaaggcttcattttctccccacacaatgcgttcaatttgagcaggggaataacaggtaatatcactatgactggtgaccttttgccacagcacttcacgaataagatgattttcaataatagtgccaagatgagataacccttcttgttgcgctgaaaacgcaatacgtccaaaactatcttgatcccatacttccataccttgataaggagctgtacgtaatgccgttaagttttcccatacccccaatttcttgagtaataactcactggcagtattaatcgcagatacccgtaatgcaaaatcatcttgcggatggaaatgcgtggtgactgggtgattttctattatcgctatacgtaatccacagccatgtaatccgcaggctaatgcaagcccgaccattccaccaccagcaataacaacatcaaatgatttcataataaaagtatcctaaaaagcaattatgctcagtttgtccaacctaatgtttggtgtgctaatttgttacgaagtgcaggcactaattccatcgtcattaagcctagattacgggagataattaacggcatacaacgattcgcaaacactttcactaagccatcagtgatcgtaatagtactttctctatcctgttcgcgaagctgttgatattgtgataatacgcgataactgccgatatcaagacctgattgtatggccgaggttaatgtattggctaatgtcattacatcgcgtaaaccaagattaaaaccttgccctgcaatagggtgcaaggtttgagatgcattacctatcaatgctaaacgatggctgatcatttgctgtgctttttgcagaactaatggatagcaatgacgctgccctacttgttcaatcttacccaaacgccagccaaaatcccgttgtaactgtgcaatggttgtttgctcatcccattgtgaaacttgttctaatttctcaataggatggcaccacaccaatgaactacgcccttcactcatgggtaacattgctaatggaccaaattgtgtaaatcgctcaaatgcacaacctttgggatcaatctctgtttttacattggcgatcaccgcaacttgatgataaggcgttttctgccattgaatatgacattgatgaccaatgggtgaatgtgtaccatctgcggcaaccagtaaatcaccgctaagttgcgtaccatcatcaagtgtcacttcaacgttatcgagatggcgctgaacatgctccactttagcgggacaatatagcgtaatattgggttgttttttcaactgtgcaaacagttgacgccccgcatcatgtaattcaataacataaccgagtgcgtcaatatcgtagtcctgcgcatttatgttcacaaaaccgcaatggcctctatcagaaacatgaacgtgattaataggtgtcacaaagggttttaagaccgaccataatccgatttgtgctaatcgctttgctgtgccatgcgctaaagcgatcgctctagcatcgaatccgggatgcccattatctggctctcgcgcttcaataagcgaaatggaaatattccccttatttaatgcggaaagtgctagtgctaacgttgcacccgccattccgccacccacaataatcacattcatgctgattttagccttaaatttttcctgccatcagagcttcaatttcatcaggatctttaacaaccatagccgttaaattttcattacctgtttcagtaataacaatgtcatcttcaatgcgaataccaataccacgatactcttgtggtacatccgcatctggcgcaatgtaaagtcctggttcaatagtcaacaccatacccggctctaagatacgatcacgatcggtgccatagtgtccaacatcatgaacatcaagacctaaccagtgacttaagctatgcataaagaagcgctgataggcttttgtctcaatgaggtgttcgatatcaccgtgcataatgccgagcttaactaagccttccaccatgatatacacgacatgtttagtgacttctttgatgcttgtacccggtttatacaattcgagggatacattgagtgattttaaaacaatctcgtaaatttcacgttgttgacggctaaatttaccattaacagggaaagttcgcgtaatatcacccgcataaccttcatattcacagcctgcatcaataaggactaaatccccatcacgcattttagtttcattttcagtataatgtaagatacaaccgttctcaccactaccgacaatactgttataggaagggaaacgcgcaccatgagagataaactcatgttcaatttccccttgtaattgatactcatacatacctggctgacatttttgcattgcgcgagtatgggctaacgcagaaatttttccggctttgcgcagtaattcaatttcagcatcagatttaaataaccgcagttcgtgcactattgggcgccaatcaataagcgtttgtggcgcttttaaattacggcgagagccttttcttaaggtatccagagcattaaagacgatttcatcggcaaacgcatattcaccttgggcatgataaacaatatccaatccattgagtaattgataaagttgctcacctacatcttcgtaaggtagcgctttatcaacacctaatttttcaggggcagcttcttgcccaagacgacgaccaaaccagatttccgcggttaaatctctaacccgattaaacagtacgctatgattatgtgtttcatcacttttaatcaacacaaggatagcttctggctcactaaatccggtgagatacaagaagtcactatgttggcgatagggatattcactatcagcattgcgttgtgcttctggcgcagcaaaaaagatagctgcacttgctggtttcatctgagctaataatgcctgacgacgggataaaaattcttgcttattcatacccactcctatcctttattgatcttttggttatctaattaataaggcaattattaatgtaatgtccgttgttcatcttgtttatcattttctgttgttgtctcttttgaggcgacaaaagtgatatagcacagctgaacagagactttgacatattctgtaacttcttcgagtgcatcttcaagctcttgttgattttcatcttcttcatagcctaatgcaccaatattacgcaaatcagtgataacttccgtcaactctttatgctcagataacttaggttgtgcaacacctaatcctaatagaaaatgattaacccaccctgcaagggcatcagctcgaggaaaaacagattctgtatcgtcaggtaacagcatagaaaaattaaatacgctgtcatcaagttgctcatgagtgacgtgataaagtgattcaaggggttctgataacgatttagggaacgctaagccctcattagtcagttcatgtaacaaagttttccaactattgtcatgtactgctccacaaataaacccagtaattaggccatgcatctctgcggcagttaaaggcacggcatgttgttgtaataatgaatcaattgctgagtaatctggtaatgtgttttgtattgacataagaataaacgtcgcatttaggggaatagttcaagatatgctaccatcaatagaacgcactgtaccagttaagctatgttaaacattggaatttttgcagtaatagcgtttaatactgccttataaccgtatacactactaaacacgtagcacagattttatgtcaggaaggaatcatgtccgcacaacccgttgatcttcaaatttttgggcgctcattacgtgtcaattgcccaccagaacaaaaagatgctttactggcttctgctgctgaacttgaacaacgattacaagatctcaaagaacgcagtggtgtttccaatactgagcacttaatttttatcgtggcattaaatatgagtcatgagttggcagaagaaaagttaaaaacgagagactatgcctacaatatggaagagaaaataaaaatgctacaacaatctattgaacaagctttacacgatcaaggcaagcaccatgatcgcactttttcaacatcaaagtagatttgttcagaaagcatgcgcacaccacgaaattaacagataataggttgctttctacaattaaaataatacaatagttcatagataaggtgcttaacagcacccacctaatttctctgagatgttcgtcagtgggtaagtcccctgagccgatatttcaaaaaaaatagaatgtggtgatctattacttgtgagcatacctgattcgttcaggcagcctaatggtgatagcactatgttcaccttggaccacgggttcaagggttacagcctacaacggcatcttggagaccccaattcaagttctaaacactgagtactgattaagtatttaatgtttagagctttttttatttctttttcctctagctttcttggcttttctcttttttacctctaaagtgtaataaattcatagaagtgatatatttttattcatactaattccttgctgatggattaatcatgacacaaccccctgttttccagcaaagagatcagatacgtaaagctatccgccaaaaacgccgtcaacttactgtggcacaacagcaagatgctgcacataaactctctgaacgggtactccatcatcccaaagtcaagcaagctaaaacaattgccttatttctctcttttgacggcgagattgataccgctcctctaatcactcatttatgggatttaaataaacaggtttgtctgcctgtattacacccttttcatcgccatcatttactttttttacgttacgctcccaccacgcagttagtgaaaaatcgttttaatatttttgagcctccactcaatgtgaataatattattccaatatctgatattgatattatctttacgccactggttgccttcgatgaaagcggtcagcgactcggtatgggcggaggtttttatgatagaacattagaaaactggcaacggcagtcattttatcctatggggcttgctcatacatgccaacaagttcattcgttaccgagcgcagattgggatataccgttacctgaaattattacacctgataaagtatggcgttttgatgaacgactgatacagagaaattaagacgagcttttaacgctatctttgtttttttatattattatcttattttataagattaaatctctatttttaaccacattgcatttaatatgaaaaatagagaaagcacgaaatttataaaaagcatcaatatcattcttaatctttcgggaaaacaattagataatacaaaaccaaacattaataaatacgatgatactatcgcatcattagaaaaaaaacatgcttttaaactaaagaaaaaaaatattcattatatttttaaaaaacaattacactacccaataatttttttagatcgttataaaaatatatttattcttttaaaatataacaataatgaatttctaatttataatctacaaactgacaatatggagacatggaataaagagagattaataaataacagtataaatcactattactatctggactttgcagaaaagcatttttttgatatcacttggtttgtcccaacctttatgaaatatcgtatattatttcaaagtgtattattttactcgttaattcttcaactgctagcacttgcctcgccgattattacgcaaataattatggataaggtaattatccatcaagccctatccacgcttgatgtgttaataataggtcttatttttgtcgccgtttcagaatctgtattaaaggggataagagagtatatttatcatcatacagcaaataaaattgatatgttgctaagtttgaaattaactaaccatttattcaaacttcctatcagttattttaaatctcgccaaacaggtattattgttacacgagtaaaagagcttgatatcattcgagagtttataacaaaaaccttattaatgttattggttgatttctcatttatctttattttcctatttgttatggcttatttgtcattaaagttaacattaatctttcttgccaccatcccactctattttatcttagctaaattaattgcccctaaaatagaaaaaaccgtacaacagctttatcaatattcagcaacaaatagtgcttttttaacagaaacgctaggaggtatagaaacaataaaaagcctttcattagaaccacgttttacacaacagtggcatacgcaaattcatcaactgactaatgaaaatttaaaattacaaaatattgataacttatcgcaatacattgtttcatttttacaaaaaataacgacagcgatacttttatgtctaggtgcttttgaagtcatttcacttgcaatgacaataggtcaactcattgcttttaatatgctattaaaccactgtctacaacctttaagttctgcaatagaagtttggggaaagtatatccgagccaaaacggctatttataatttacaagacattcttaatctcccaatagagcaagaaaaagccaataagaaaatgaccttacaaggtgaagtgagttttgagaatgtcagttttagttatcaacatgatgccccccctgttgtaaggcaaatttcatttagaataaatgaatatgaaactattggtatcgttgggacgtctggatcagggaaaagtacattagcacgcatcatcgcagggctttatatcccacaattaggtcaggttaagcttgatgacattccggtttgtgaaattccccccgcagtattacgtcaacaaatagggtttgtcttacaagagaattttttatttcatttaaccgtgctcgacaatatccgtttaacgcaaccatcagcctcattagatgatgttattcatgtagctaaattagcaggtgctcatgagtttattttaaaacttcctttagggtacgacacactcattgctgaaaatggcagatctttatctgggggacaatgccaacgtattgcaattgccagagccttactctcatctcctaaaattttaatttttgatgaagctaccagcgcattggatggtgagtctcaagccatcatcgaaaaaaatcttccccttattacccaagataagaccgtcattatgattgctcatcgcctttccacaataaaaaactgtgaccgcattattgtattagaaaaaggccagataatcgaagaaggcaaacataatgaattgattagaaaagatggcgcttataagaaactttggcaacatcaacaaggataacaatgatgaaatcaaaaataaaacaaatgattgctcactactttaaaactaaaaaagagcctaaaaactatgatttttaccctaatcatatcgccgtacttgagaaaccgccgacaccttatagtcgtattattgcaataataatttcattaagtgtgattatatttttactctgggcatatataggtaaattagatgtgctttcttcagctataggaaaattagtggtttcaggttattcgcaacaaattcaaatttatgaacatagtcgcttaagcgccattcatgtaaaaaatggccaacaagttaccaaaggagaagcgttattaacacttgatattttaggtgttgatgaggagattaataatctaaaaaataagatagaaaatctattattactaaaaattcgttatcaagcattaggtcaaaacacccgacctgatacaattgatgattttaatttactaaataaagaaaaaaaagaagcggttctattaagttatcaaaaagaaaaggatgaatttgatgctagtattaatcatattaattctgaaatagaaaccaacaataaaaacaagcttcttactcaccaagaaatcaattcattaaatgaattaaaaaacaatattgaaaaacgctttaatataaagaaaaaactctatgataaaaaaattattagtaccatggagtttttagaaaataaaaaggagttattagaaattaatcaaatcattaaaagaaaatcatcagaactggttattttatccagtcaagagcaacaatatataaaaaatcgcgatagattagaaaaacaaaaacacctagagtggcatgacaaatttaaacaatatgaaagcggagtttttatttatcaacaaaatctttatcatgttcagaaacgtcaacaattaaaaattgttcgttctcctgttacaggtacagtacaacaactcgccgttcataccctaggagccgtattgcaaccttcacaagcggtgatggtgatagtgcccgatactcagcataatgttgctgaggtgaatattctcaataaagatattggttttatctatccgggtcaaaaagcggtgattaaaattgatgcttttccttatacccgttatggcaccattgaaggcaccattgtcaatatagcaaaagattccatacaacatgaacaattaggcttagtttatcccgtcctgattgaacttgataagcaagtgatgggtgaagatgaagcacaatataaactggctacaggtatgtctttagttgccgatataaaaattgaaaaacgtcgagtgattgattatttactcagtccaatagaagtttatcaacatgaagcattaagagaaaaataatagcgagatatctatgaactatataactaaaaatacgccatctcttcatccttcaattattgatgggcttatttatttttcaaaaaagaataaaggaacattaaaaaaagagcagcttattcattttttaggtaatgacgacaatctctctgaattaaatatcatagaagccgctcaacaactcaatttaaaatgcgaattttcattttttaatagtgaaagtgagtataaagataaaataattattgatacacttatcgaaattaatggttattggtatattctaaaaaatagaacaagtgataaattaattattattgacccaagcactaacacagagagtcattatcatattgataaaaaaatcacttataccacactgctaattattaataagatatttacccctaaacagagcaagtttagcttaatgtggtgtattccatcactattaaaacaaaaaaaatcattatatttaatttttattttatcttgttttattcaattatttgctttagttaatccaattatttttgaaaaaattattgataaagtattaacggggagaagcctctctaatttgcaagttttaggggtactccttgtgctgattgccattatagagcctatctatcttttattacgagataaactttatgcttttgtttcttgtaccctaggtgccgaattctcagggaaaatttatcaacaccttattcggctacccagtcagttttttaatcaacgtcaatctgggcaaattattgctcgtattcaagagcttgctcatattcgccagtttattactggctctgcgttgatgatggtactggattttatttttattatcgtatttctttcagtaatgtttgcttattccgtattattaacttggataaccatagcagcattagtcgtttactttttattttggctgatacttggccccatgatccgttattgggttgaacaagagtatcaagcaaatgctgataatacgagcttattaacagaagctattaatggtatagaaaccataaaaataacagcaacagaacatcaatttattgaaaagtggcaatataaactcactaattatatccttaagcgtttttcagcggccaaaaaagcgttacttgctcagcaattaattggggctattcataaaattactatggcaattatcttgtggcatggtgttaatctgattatgaaagcgcaattaagtgtgggcgaattagtggcttttaatatgtttgccacccatattacacaacctattttacgtttagcccaactttggcaagatgttcaacaaacaggcatctctatacgtcgtattggcgagattgttaatactcccacagagcatcagcatcaaggacttgctactgtacctaatattgcaggaagtatagtattttctcatgtacgctttcgttatacagccaatactccagatgtgattgagcaactctctttttcgatccccgcgggcaaatttattggtattacaggcccctctggttcaggaaaaagtactatcacacgtttaattcaacgtttttatactcctcaacaaggccagatttatattgatggtatggatctcgccattgccaatccccttactttacgccaatcaattagtgttgttttacaagataattttttatttagtggcactattatggaaaatattcggttatcaaaacccgattgtagtgaagaagatattattgaagcgagtaaattagccggcgcttttcattttattactcaactccctgagggatttaatacacaagtgggtgaaagaggtagtaatttgtcaggagggcagcgtcagcgtattgcgctagcaagagcacttttacctgatccacgaattcttattttagatgaggcaacatcggcgttagattatacctcagaagcagaaattttagccaatcttccggctatttgtaaaaatagaacggtaatttgtattgctcatcgacttaatgctatttctatttcagattatatttatgttattgataaaggtcgtatattagaagaaggtacacatagcgatttattaaataagaaaacactttatcagcaattgtggcaacaacagacacagcaataaaccgtgataagtaatgaaccataaaaataaaggctctaattattgagcctttatacttaatattaaaataacgatattagtacaacatacgagcacgaatggtacccggtagtccttttagtttttgcaatactaactcagcttgtgctttcgtttgtgtagtaacgtcaattactacataacccacattgccagcagtacgcagatattgcgcagcaacgttaatattttcttctgtaaatacgttattgatactattcataatacccggacggttttcatgaatatgcagtaaacggtttacatcatcaccatgactaggcaatgatacttcagggaaattaaccgcagataatgtagaaccattatcagaatatttagctaacttaccagcaacttcataaccaatattttcttgggcttcttgggttgaaccaccaatatgtggcgttaagatcacattatcaaatttaattaattctgatacaaaaggatcgttcggatcgttatttgcccccggctccgttgggaaaacgtccaccgccgcacctgataaatgtttactctctagcgcttgtgctaatgccggaatatcaaccacagttccacgagaggcattaataagaatagcgcctggcttcattcgtaatagctcttcgtgaccaatcatattttttgttgatggcgtttctggcacgtgtaagctaacaatgtcacacatattcagcagttcagataagtgacgaacttgggttgcatttcccaaaggaagtttgttttcaatatcgtaaaaatagacatctaaaccaacactttccgccaaaatccctaactgggtgcctatatgaccatagccaataatccccagttttttacctcgcgcttcaaaacagcctttagcttgtttatcccaaataccacgatgggctttagcattagcttctggaatacgacgcagtaataacagtaattcccctaacaccatttcagccacggaacgagtgtttgaaaaaggtgcattaaaaacagggatcccacgacgggcagccgcatctaagtcaacttggttagtaccaatgcagaagcagcctacagcaactaatttttcagcggctgcaaaaatttcttctgttaagtgagtgcgggaacggatccccacaaagcgtgcatcacggatagcttgttttaattcttctcccgataatgcacctttatgatattcaatgttggtataacctgctgctcttaaattctctaccgcactttggtgtacaccttccaatagtaggaactttatcttttctttttccaaagataccttgaccatttaccctgccctatttgtgttacatgaataaaaacgaaatcctgtttcaccaacataacaaaaatagattttgaggcaatacaaccgattgcactgttgacagaataagcgatagataaagtgattttctaccgagcaaaatgattttgacaataaaaatggcagcattttaaagagagatatctctatcgtgtgatatatatcactgaatttatggttttcaaaataatttgcaaaaagtcatcattctgattatctaaggggaaagataaaagagagtgggaaaacaatatagttcacccactctctttagacgatactgttattatctctgactagagatgcagtttaatcgtatcatttaatggttttcacaccttcagaagtccccattaatacaatgtctgctccgcgattagcgaaaagcccgacagtgaccacccctgcaatactattaattttattttctagctcaataggattcagaatagtgagattataaacgtctaagatcacgttaccattatccgtcacgacgttttcacgatattcaggtaacccacctaatttaaccagctcgcgagcaacataagagcgagccattgggataacttcaacaggcagagggaatttacccaaaacatccacttgtttcgattcatcgacaatacacacaaaggtttttgccaccgctgcaatgattttttcacgggttaatgccgcaccaccacctttgatcatctgcatttgatggttaatttcatcagcaccgtctacgtagatatcgagcgaatcaacttcattacagtcaaaaacgggaatgccatagctttttagttttgccgttgaagcctctgagctagaaactgccccttcaatttgacctttcattgttgcaagagcatcaataaaatgagaagccgtagagcctgttccaacgcccacgatagtacccggttttacatattcaagggcggcccaacctactgctttttttaattcatcttgagtcatttacaaaaccttatttttcacatttatcgaataagaatagcatagtgcccataaaatccgcacaaggtgtatcaaaatttgagacacaacattttaactcataaaaactaaaaatatggcatagtacacagtagaacataaaatcaaagagaatctgtcaatgaaacgtcctgattatcgggccctgcaagcccttgatgccgttattcgagagcgtggttttgaacgagccgcacaaaaactatgtattacgcaatctgccgtttcacaaagaataaaacaacttgagaatctatttggacaacctttattagtacgtacggttccgccccaacccacagagcaggggcaaaagctactcgcattactgcatcaggtcgaaatgttagaagagcagtggttaggtgatgaaaatagtggctcgacgcctcttttactctctttagctgtcaacgcggatagtttagctacttggttattgcctgctttgcacccggtattaacacaacttcctatccggcttaatattcaagtagaagatgaaactcgtacccaagagcgattaagacgtggtgaagtggttggtgctatcagtattcagccccaagcattgcctagctgtctagtcgaccaattaggcgcattagactatctttttgtggcatcccctgattttgcccaacgctattttgcaaatggggtcactaaatcatctctgttaaaagcccccgctgtcgcatttgaccatcttgatgatatgcatcaggccttcttacagcaaaacttcggtttatctcccggtagtgtgccctgccatattgttaattcttccgaagcctttgttcagttagctaaacaaggctcaacatgttgtatgatccctcatctacaaattgccgatgagctaaaaagtggtgaattgattgatttaacgccaggattatgccaacgccgcatgttgtattggcaccgttttgccccagaaagcagaacgatgagaaaggtaacggatgcgttacttgattatggtcgtaaagtgcttaagcaagatgaagagtaaaaagtaacgttgatgatattgtttcttgatcaatattatcgctattcttagaaagggatttaaccagtgtgttccatcaaccggtttaactcacagtgaggagttgatgttttcctctaccggaagaagcaaatttaagttttattggcatttaacgggcataatattgtataataaatgaacataggaaaaggagattcagatgagcacttttattcgtcgaagtcgcaacgttgctctagccattgatgctggacgtaaaagtggtagtgctaacatagaaggtaatacccctgctgatattcaagccagcctgctgaaaagcttaggtgagtttactgcatctattccaactacaaaacaacaaccttacgtgaaaggatctcacggtgccaatcataaaaaaacctatttcgggcgttgatctccgtgcaagtttttatttgacttcccaaagtttaggatatccttcaaataaacaggcaatattaatggctgatattgccacattaatagctaaatggaggaatggcttagaggtcgaaatttatacggaaaattatgaatttagatatggtaggatcaagtcttcacgttttaacgcctctggtgaggaaagcgtatattatgcaacttactttcatactcgtgccaagccaaaggacaatgatccacttctaataattacttttgatcccgttgttggacaagacgattttatgttcattgagaccattattgatcatagaacctattttggttcaccgggtgcagataaaactaaatctcatattgaaagacggtcatctgatttaaaacgccgtattgaaaatggaaaaaaaattagttccgaaccttcatcttcagttcaaaacgttaataaaaataacaatgattcgcctgaccaagaaaataagtaaagatgctttttatatatgtaatattttctgacataaaatcattttaaaatataagcttaataaccgtttttcgcacccaaaagaactaccagatctgatcctgcgctataacatagatgtatcagctcactgctgagccaatacatcttatcctttgatggtaaagattatttagctgtttttaattcaaataccacgtcaacgtaatctttaaactcaatgctttgttgttgataggtctcttttactgcttccggtgacggggcacttaatgccatagcatccattttcattcgcgctatcggataaggtgttgcttctggtgcgcgataacttacactataaacagcccctaaatcagcaccaaacccttttgccactgaacttgcctgttgtatggcatttttaattgccacttctcgtgctttggctttgtactgttctggatcattaacgccaaactcaacattattaatttcatttagccctgctgctaatgccccatccagtaaggtattaagctgatcaagttttttgatttttacatctacggttcgtgttgctgtatagccattaatcaccgaacgttctgcttttttatcatactcataattaggctgtgtacgaatgttggcagcatcaatatcttctttcgtcacaccgttttcttttaaaaaggcaaaatattttgcaacacgctcatccacttgttttttagcttgagctgcatcttttgctttttcactaacctgaatattaagtgtcgccatatcaggagtcgctttaattgttgcattacctgatgtagttatatgtggtccttcaggtaccgccccagctaaagcgattgagggtgctccaagggctaacatggatgctaataccattgcttttactttcacaaaaacctcctgacaaaaatcatgtatgggtattgtcactaaattacggttataacaacattagcatatctgttgtaaagttctttcagattaaaagaggtttttccatccctgagcggccaattgcagagcaataaaccacatcacacaccccacaaacaagttgatgatacgttgagcggtcacttggcttaaaataggtgaaaaccaagccgctagtagtgataaagcaaaaaaccaactaatcgatgcgaataccgcgccaaaagtaaaccaaggacgtaattctgctgataattgccctccgatactgccaagcactacaaaggtatcaagataaacatggggatttagccaagtgacggcaactaaagttacaatcacccgccaacgacttttcacttgatttttatgttgtgataattcaatctcttttgtaaaagcggttttaaacgcattccagccataccacaataaaaaagccacaccgccccaagtgatcagtaataaaagatattctgattggctcagtaatgcacttccaccaaagactcccccgctaattaatatcacatcacttaaagcgcataaaaatgcactcattaaatggtattgttttttactaccttgttgcaaaacaaaggcattttgcgcaccaatgggcaatatcattgctgcacttaataaaaacccctgaaaaaatgttgttaacatgcaaaatatcctaataattattcattaaattaagaaaaataataaaatgattttgttattagaggaaatgaatcattcttattgataataagaaaaactaatagcggtaaaaataaaagagccacgcttaatcggtggctcttgagatgtgttttataacaatagtgcttattctgctttcatcacggtattttgtgcttgatgcatatagacatccatttgtgggaatggaataccaatattatttgcatctagcgcgcgtttaaagttttccataagatcccaataaactggccatgcatcatcattggtggtccaaacacgtaccacaaagtttaatgaagaaggcgccatttcatgtaaacgtattgtcacgccttggttatgttgaatacgtttatcttgcgcaacaacatcaccgagcacttgtttgactttatcaatatcagcatcataagcaacgccgacaataatttgtgtacgacgatttggctcacggctaaggttaataacctcactactgataattttgctatttggaataacaatgatccggtcatccgctgaacgtaatgtggtcgagaatatttgtacatctcgcaccgtaccttcgacagcaccaatcatcacgtattcaccagcacgaataggacggaagataacaattaaaacacccgctgcaaagttagagagtgagccttgtaatgctaaaccaaccgctaaacctgccgcaccaagtactgcgataacagaagctgtttgaacccctaatcgacctaatactgcaatcaaagtgaatgcaataacggtataacgcaccaagacagacaagaatgtcacaacagttgcgtcgatatggcgtaacgttaaaattcgtgcaacccctttactgaccattttagcgacaaaaagaccaataaataggatcaagaatgcagcaacgatattcacagcatattgaataaagagttcttgattagcaacaaaccaacctgttgcttcatctaaactcgcaggtaattcattcattagaccaccttttaaacttataatcctaataaaaagaatagcaaccaatagtatattgtggcagatttatttaataaatatatgggatttgttaacttcttctattttccagaataaataaccgatatttttgtagcatagtagcaaaatcatctaatccacaaaatgcgatgctttcattatcgtagtagctcatcccttcttctaaatcatcggtttcaaaatggagagtattcgcccttaccataatttcctcatcatcaatagataagctgtattctttaccaatcaattgccactgtttctcactgcctttaacttcgtccatctcagtcaaaatttgatcgattaagctgatatcaccttggatctcatcatttaaccaataaccaatcgcctcatgatccattgaaaaacgggccaatataccgccagtaagatcacgctgaaattcatagtccatggtgtatgccccttaaattagctgtcgcctttttctatataaaatatctattgttattatggcaaaaataacaaaaaaacaggaggcattgcctcctgtttcagactgctgaacaacgttatatgttggaacgcagttgtaatcaatttttagtgaaaaatcaaactcagttataccgtggtttggaaaatcacttgtgttgctttatctgtatattgctctagttggtcaaaattgagataacggtaagtatcttccgccgtttcatcgactttattgatgaaatcaagatactcttgtggctctggtagacgtcctaacagtgaagccactgccgcaagctctgcggatgcaaggtagacattcgcccccgtacctaaacgattcgggaagttacgtgttgatgttgaaacaaccgttgccccatccgccactcgcgcttggttacccatacataatgaacatcccggcacttcgatacgagcgccactcttaccaaagacgctgtaataaccttcttcagtcagttgtgctgcatccatttttgttggtggtgcaacccataagcgtgtcggtaattgacctttatgttgatcgagtaatttacccgccgcacggaaatgcccaatattggtcatgcaagagccaataaagacttcatcaattttgctgtttgccacttctgataatagacgagcatcatcaggatcgtttggtgcgcaaagaataggctctttgatttcgtttaagtcgatctcaattacagccgcatattcagcatccgcatctgcttcaagtaattgcggatcagctaaccaattttccattgccgtaatacgacgctcaagtgtacgacgatcaccataaccttctgctatcatccattttaataagacaatgttagattgtagatattcgataatcggtgctttatctaatttaatcgtacaacccgcagcagaacgctcagccgatgcatcagctagctcaaaagcttgctcaactttaagttcaggtaaaccttcaatttctaagatacgaccagagaaaatattctttttaccttttttctcaacagtcaataacccttctttaatcgcataaagtgggatggcatgaaccagatcacgtaacgttacccccggttgcattttacctttaaagcgtactaacaccgattctggcatgtctaatggcattacccctgtagccgctgcaaaagcgactaagcctgaacctgcagggaatgaaataccaatagggaaacgtgtatgtgagtcaccaccagtaccaacagtatctggcaataacatgcggtttaaccatgagtgaataatgccatcacccggacgcagtgaaacccctccacgattcataataaaatcaggtaacgtgtgatgggtggttacatcaacaggttttggataagcggcggtatgacagaatgattgcataaccaaatcagcggagaaacctaagcatgctaaatctttcagttcatcacgtgtcattggccctgtagtatcttgagagccaacggaggtcattttgggttcgcaatattcaccagggcgaataccatcacgaccacaagcgcgtcccaccattttttgtgcaagtgagaaaccacgatcgctttgttccactgctttggcatgacggaataaagtgctaggtggtaaacctaaggcgctacgagcttttgaggtcaatccacgaccgatgatcaaaggaatacgaccacccgcacgcacttcatcaatcagtacttctgtttttagtgcaaaggtttccaataactcattggtttcatggttacggatttcacctttgtatgggtaaatatcaataacatcgcccatatttaatttagaaacatcaacctcaataggtaatgcaccggcatcttccatcgtgttgaaaaagataggggcaattttgccacccaatacaaccccaccaccgcgtttatttggtacataagggatatcatcccccataaaccaaagtaccgagttggttgcagatttacgtgaagagcctgttccgacaacatcccccacataagccagtgggaaaccttttttattcagtgcttcgatttgtttaatcgggccaacactacccggttggtcgggttcaatgccttcgcgggcattttttagcatagctagagcgtgtaatgggatatcaggacgagaccaagcatctggtgctggtgataaatcatctgtattggtttcccccgtcactttaaacacggttaccgtgattttttcagcaagttctggacgttcagtaaaccattctccatcagcccaagattgcataatttgtttcgcgtaaacgttgccagctttcgctttttcttcaacgtcataaaagctatcaaacatcaataaggtatgagaaagtgcttttgccgcaataggagccagtttgtcgttatctagcgcttcaattaatgcatggatattatagccaccttgcatagtacctaataattctacggctttttctggcgtgataagcggtgatgttgtttcaccttttgcgagagccgttaaaaaaccggctttaacataagcggcttcatcaacgccgggtggaacacggttaacaattaaatcaagaaggaattcttcttcgccttttgggggggactttaatagctcaacaagtgcggctgtttgtgtggcatcgagaggttttggaacgacaccttcagctgcacgctctgctacgtgcttacggtattcttctagcacgactttctcctcgcttctttgtcattttgtataacccggctgtctgcaccctatctagttggatgccaggtcagaggatcttttgctcgcataaaacatctatggttgtgaaattatgcccagctaagggctatcagcatagcaaattttcaacactatgttaattcgttcacataaaagcaacatacaacaaacgtaaatctcaccttattcatattatgacactcaatctaataggcatttttcaccagcctcgtttttaccaataaactcagttaataaatagatatcagtgctactcggtaaacgtaacttatcttgtaaattaaagtcatttgatttaagtaataaataactagaacaataaaccttacacatacatcctttagaattattttaaatagaatgcttataaaaataaacccaacatcaccaacaaataaaaacttaatcaataaactactataaaccccatataataattattttttgatagagttttaaaatctaacatattaatatgaaatagcattaccatgctaattatttaaacaataatttcattaagttcatttacaaatagcacttagcaattacgttcaacctttacatttaaaaaaagaaaattatcgatttattcattaaaatgattaattatatggagaaagtctttatggcaattaacgaaaaatttgtccaagaaatatcaagcattaattataataatagtatattttcactctattttgtcggtcaagatcctcataaaatagcacaaggtatcatgccagaaaaagatgaagaattagccctaaagtaagtgatccacattcctgcttctggttttatttatatggcttcaataattaaaagcatgctggaaaatccatgcataaacaaagagtttgaaaagctaattgcagcagatctacttcctattcttcaaaatgaaactaatatgactgaaaattttactgcccttcatttaataaaaaaaacaaataatagaagaataattttatagaagaacttattcatcataaattaactcttaccctgtttattaataactgaaataaatacaactaattaaagagaggaaacgattatttacaataatcttctctcttcaggttttttgtcttaaaaaagacaattcagtcaagtcagacgctagaagggtatatagagatgctagaactactgtatttaaaaattactgtactttttattaaaaataagtttgagggaaaatgatgtcaaaaattttaaaagatttagagtttacttttacaggaaaacgttatggtacagatggaaatgacgatattgatgccataggttttggagggatcatttatgcaggaaagggacacgatacaatcacagtcggaacatttgcagttaccgcttacaccggagacgggcacgattttgtcagagggggaagtgcttatcttaagattattgatgagaacggtgatttagatgtcagaggattaaatgcatggggagaaattgaaaagtccggtcatggcgatctgaaatatgttggtgcttctgccgcgattaagattaatcatactggatatgaatatggaaatatcaattattcaggagctgctattgcaaatatcatcacccgtaaaggcgcaattagtaatatcaactaccaaggtgctggcggttacaatcaaatttggcatgaaaccaatactggcaatatgacgtttaaaggggggggaggctataataaattggttcgtacttggtttaatagctatcaaaattcaaaaggaaatattaattttgaaggattaggcggaggcaacggaatcttctctcgcgttgaaacaggtgatattaaatttaccggaggtggcttagaaaacgtcttaatacgcgaaggtaaatcaggcgatatctttatgtatggagcaggagccaataataggcttacacgtatcagccgaaatactgatacctataaagaaacaagtggcaatatctatttttcgggggggggaggttataatcatatctattccaatatagcacaaggcaatatcacattttatggagctggggcttacaatgagatcattcgtacaactcaagttcatcctcataatgatttattagttgaatatacgaaagctgaaaatatttttctaacaagtgcttatatgttaaatctagacttagataaaagtattaattttctaacaagtgataataagcaaaatttcgaatccggtaaacctgttgaagtaaaagcgattaaatcattgcgagaaccaaatacttatttgtttaaaacaccgggcccaggggataccaatttattcatatcagactatggtcgtcgagattatacctttaataaagtcaaaatttacaatgatcctgaaacgggaaaacttcaatacgattccgaactttggcgtataacgcctgatagtggggacattaggaacatacgttttgataaaaaaaattttgaggatacctataatcttagtgtggtcaataattgttggaatacattagaaaaacaagaaattatcgaatcaccacgtttcacaaaaataaatgctgatagccactatcaattatctaatttaaaagtatttcaacacattaatacagaacaaatccaaagaaagtctctagaaacaatcaagttgggcgtagcacaagaactttttaaagacgataattctgctgaatgctctggtgatatcaatttcacaggtggtggcgctggtaatgtcattaaatctgatgttacacaaggtgatatcaattttacaggtggcggcatagcaaatgtaataaaacataactctaattatggtaataccaactttactggtggaggcgcagccaacatcattgtaaaaaaaggtcaaagaggagacctaacatttgatggaggaggattagcaaatgtcttactacatcaaagtaaagaaggaagaatgaacattaatgctactggtgccacgaatgtattaatccgaattggtgacggtgaatataaagcacatcttacggcattagggaatgtttctattcacaaaggacaaggtgatagtcatatcacaatgttaggaggattaaatacccatacccagattgatagtcatcagcgtgataaggctttatggcgagcattaggcggacttaatgtcatgacacaagtcggtgctggtactattacatctttactcggcggcggtggaaatgtcctgactaaaatgggtgaaggcgacctaagtagcatcatgttaggtggtgctaatatcattacacatatcagcaataacaaaataaaatcaaatacttacactatcaccctaggtggattaaatattttaacaaaaaaaggtcaaggtgatattttagccataatggggggaggtggcaatgtcctaacacatatcggaaacggtaacatacatggcgttatgcttggaggtgccaatatcttaactaaagtaggtaatggtgatctttcaggcattatgctaggtattggtaatgtactaacacatgttggcgatgggcaaaccctaggtataatgggcgctgtggggaatattttcactaaagtcggtaatggaaccagtatgggtgccatggtcggtggtggcaatatattcacccatataggtaatggtgaagcttgggcactaatgggaggtttaggcaacgtctataccaaaataggcaatgggaatactttggcactaatgatcgccaaagggaatgtgttcactcatgtgggtgatggaatgtcggttgctctaatgttagcgataggcaatatagccacaaaagtgggcgatggcatgacattagctgcaatgattggcagtgctaatatttttactcacattgggcatgaagaaacctttgctgcaatggtgggtaaaggtaatgtccttaccaaagttggcaatggattaacattgggattaatgctaggtgtggctaatatttatacccatgtcggtgatggcattagtattgggctgttttctggtaaagcaaatatcatgaccaaagtgggtaatggaaccacattatcagcgatgtttggcaaagccaatattatgacccatatcggtgatgggataactggcatacttgcattaggccaagccaatatcataacaaaagtgggtgatggcattgcgggaatcattgctggtgcgaaaggaaatatcgttactcatgtaggtgatggaataaccgctgcgatcctcggcggaaaagcgaatattttaacaaaagtgggtgatgggctcaccgtaggtctgctgatttcaaaggtgggaaatattatgacccatattggtaatagcaccacgattggttttgccaaaggcaacgccaatatcatcacaaaagtaggctatggtttaggcattaatgcggcatggggtaaagctaatattttcactcatatcggcgatggtgaacgatataacttcgccaaaggaaatgccaacatcattaccaaagtaggtaatggacaagaaacctctgttgttaaaggtaatatcaatattattacacacgtaggtagtggaaataattatactggtgcatggggcaatgggaatgttgtaacacaaattggtgatggtcgtcaggtcgccttagcaaaaggtcatgcaaatattgtcactatgctcggaaaaggtgacaactatggcatagtttggggtaaagccaatatttcgacaaaagtaggtaatggcacgcaagtcaccatagcaaaaggccaagcaaatattacaacaaccgtaggtgatggcctaggtgttaccgttacatacggcaacgcaaatatcaatactaaagtggggaatggtgtatctgtaaacgttgcttgggggaaatataacgtaagtaccaaagtgggtgacggcttaaatgtttcggtcatgaaaggtaccgctaatgcaaatatccatgttggtaacggtttaggtattaacgcctcttacgcaaaaaacaatgtcatcgttaaaattggcaatggtgatatctacagcttatcggttgcttctagtaatactcaaagtaataaactcgctactttcttcggcaatataaaacagagtgtacttggtgtggtcgggagtcaggctattaactatttagtacaaggtgatgatgtaaccacttccggctcccgcaaaggcaaaggcgctattcatttaattgaaaaatcttcaatcgacggtttcaaaatgaacaaaatcgacgaagtgaagagtaacattgatataaatttaaaaggtcatatcacagaggtagaaacccctagtttaagtgatgttaatacagatgaatccaacttaaccaataacagtccgaatttgatcataaatggtgactttaaacatggatttaaacctgtaacagaaggttggaatattgcatatactcaggataaaattacagcaattagccaatatggacatagagcctctattgatacaccaactaatactaataataaagattattgggatggtggacttatagcagaatacaaggaagaatatgaaccaaatatcgctatatatcaagatattagtggtttaatgcaaaatgaggtgattgaattaagttttgagtatgaacgacaagataatacgccaacagagaataaattaagtgttatctggaatggtgaggttgtcttcacttcatcaagtgatgataagtcaatagcatggcaacaacaacaaattaaattaaccgcaaatgcagaaaataatcgtcttatttttaccattccaggctctgatggcttgcaaggaaataattacagactaagaaatattgtcgctaaatcagctgtagcaaatataaacaagcatatctcagattctgatgcgacaaaaaatgccctcgctgacaaaaagaaggcagatgccaatcgtcaaaaactaactgatgaaaaacaacgcctattagaccacatctctaccacacagactgaacttgaatcgaccgatcaccttgcactggagaaaaacggccatagagaacgcgatgccattcttgaagaagctaattcagtaacacacaatttgaccacagttggtcaaacactggaagtactcagcgaatattcacaagatgcccccccctcagatcaaccatggagtgagccattcgcggaaggaattttaaaggatgtacagaagagcttaattaatactaaaaaaattgtttcagtgcctgttaataatattaaaactcagtatgttgcaaaccttacaaaggtgaaaaaatcgataaaaaaatcggaatatggcgttattcaaagtgaagaacattgtcaagaagtgcaactcgatacttccaaagcaaaaaatgatgcagataaaagatactcagacgcgatagataaaaaaaatagtgctcaaatggcagagaaaaaagcatcaaccatggtggaagatgcgagatcacgaggagatacggagcaaaaaacagcgactagcatatcggataaagcacaaaaagaagctaaatctgttcaactgaaagaaagtgataaacctaatcgtcacagggcgcatggtagcggtttatccggagaagcggcctatgtagagggggctgatgataatccatccagttatatcaaaccaatatcaactaaaaaaaatgatggtcgtttcaataataaactgacaacatttaatcaggaattacttgatgatgctcagcaagccattaatcgtttaagcattaatgctgggatccgacaaaaatcggcaaacgttcttccctcttttacatcagaccttaatggagatgacgtagcaacctatcaacaaccttctcttcgttcaggcaatcttcaatatcacaaaataggagctatcgcggtcaatctttctggattaggcgaaagccccatttttgaaacgctaaaacaaaaattcaatgtaaaaattaagaatagaaatacttactttacttttattttggaaaaaaatagtggtcgtatccaaaaaaatatttatttggataacatcaatgatcccactcagcaaaaaataatagaacactttattttagctaattattcaaattttgaagcaatgcctaatgaacttcatttagaaaatgacaaaattaaatcaagtcataacaacaaagataggatacttgcagaatacgtagaacataaatggcaaatgctaactgattcaaaagtcatgtcagttgatgaactacataaagttgcaagtgttaaaggcaaaatacaaggcgaaagttataaatcaatcattacaactctctcggaataccatgaaaaagaatcgaatacaaactgcttaccaatagagaaattgagagtgctagctcagttgcgaaaccaaattgatggttacctattaggacaccccgactctgaacgcaatgatggattgaaacagttacaaactcaagtcaatacacgttataaacacgcatcggctttaatacaagatagtcacaccatcaacgctgatagcagctttagtcgcttatacgattcactttcaaatgccaatttaaaaagaagtaaacacatttatattgatattaacggacactttgtcactgaaggaaaaaacaatctgcaagggaaaaatagactaaccagcggaaaagaagtgattgagcgagtaaaaaatgccgtagaaaaagaatatggcgcaccgattgccaataaagtcttcagtcaatttgcaaataatgaattcgctgaaaacggcgagggtattgatgtttcagggttaaaaaaaattcacagagctattgagcgggaactatctcctcatagtgcaaccttatatatctggaaaccaagcaatcatagtaatttgggacacgccacactacaaataggtcaaggtcgcttactgttaaacacagaagacgcacaaaataatcataaagaaaactacatcagttggtggcctaacaaggcgaagtcatattttgatgtgatgggagtcccctcacaaccaaaagagtcgttagcatcggatgttgcagcagaagaaaatgatggctttggtttaaattacaaatataaagaactaaacagatatgaccgactcatgaatattgcgaaaggtgaaacggtcaccactgcagatgatttatctcttgcagacgcaaaaaatatattgacgatcccaaattatatagaaaattcaaaaataccgcgaacaattggacagccttttattgatgaatgggtaataactcagaaaaaactcaacaacatcgccacaaattttctagaagctgtacaaggtaaatttagtggaaataccataactataaatggtgccatgatactattgacagagcccacgttactatcaaaaagaaaaatcccactttctgttgcacagccttttattgaacaatgggataatataaaaacacaacaagaagatatatctattcaattattaaaagcgatgaagacttggatacaagaaggtaaggatccaacgttaacgaaaaaacgaattgctttagtagaaaacgaatttgctgagcaaaaacaaaaaagtattgacagatttaaaaccagcttacctgatgaaggacgagtattccgtattaatttagaggggttagacgttgctgctatgcaagctgaatggcaacgaattaaaaattcacctaatggtcgttatcatttattaacccaaaattgttcgagtatcgtagcgaaaattttaaaagcgggtggcgcagatgaactgattggctataactggcaacctaaatataatatttggacaccaaatcaaatgttcgcatttgctcaagagttacaagaagcgcaaatggcacgacaacaaagtagaatgattccacctaacttacacgcgttgtcaggttctgaaaatatccgtcaagagctagaaaacacctcccctcttatttctgctgaacaaaagctcaatattgtttttagtgaacaggaaacgggttttctactgacacaagcatcagatgaaacgaatgaaaaatttatttatataaaaaatggagataatcaagaacaacaaaaaataatgagtaattttatactcactcattatcgtgattttgactctatccctgagcaactttatttcttagataatacaatcgtgtcactcgataaaaaccattcacgaatattatcagaaaaagtcggtgaaaattggcaacctgttgcctattcgaatctaatgactgctgatgaattaacctccgctgcagaggtgacaggaaaagcacgcggtgaaaattataaagcgatcattcaatcgcttagagattatgaattacaaagtacaaatacaaacaacacaccaatagatatatttcagcaactatccacattacgtatacaaattaatagttatctgcttaaacaccctgattcaaaacgtaacgaagcattgcaacaattacgcgaccaagttgatatacgttataaacatgcttctatcttattaagtaatagccagcaagttgattcaaataatacttttagttatttatatgagattttttcaaatgctaacttaaaaatcaacaaacatatttatcttgatgaaaacggcaactttgttacaaaagggaaaaataatttacaaaaccaagacaaacttatcagtggtaaaaatgcaatcacaagcattaaaagattggtcgaaaaagagtatggcagtgaaattaccaatcaggtatttaatcaatttacagaaaatgaatttgcccaaaatggccatggtattgacctgtcaggattgaaaaaaattcaccaagcaattgaacaacaagtttcaccaatcagttctacactatatatctggaagcccagcaaacatagtcgcttggggcatgctgcgctacaaataggttctgggcgcttacaattagatagcgatagtgtgcaggataaccatgataataattatgtcagttggtggcctgccgggagcaaatcgctcgcaaacccactgaatattacaacagaaaaaaatcctgatttaaaattacgctggtatgatttaagccaaccagtgagtcgctcaacaaatttcatgactttacaaattgatattcaagaagaggaaaagacgaatttcaaattaaataaagatgaaggggaaaatgacagacagttaaaagaatttagagataaaacgaatcttacccgaggtctcgaaaatattacacctgaaatcgcaggcttactgttgaaagctcctcatttgataccagaaacacttatcccacctgaaatttcacacccctttattaaacagtggaaaagcccaaatagtaatctacttgaagtatcaacaaacttttcaatcgcagtgaaaaactggctaaaagtcgcctttccaacagcgatgattaaccaaacctttgcattggaaatcaagaaaattaaagaaattgaagaccgaaaaacagaaaatttcaaaacaagtgtcgctgatgatacaaatgatggcgtggtgtttcgcattaatctagagggacttgatgccgccgccatgcaaaaagagtggaagcgcattaatagccagtctgatcctcgttaccaattattaaccaagaactgttctagtattgttgctagaatattaaaagcaggcggagcagatcaactgattggtcatcattggaaacctcgatttggcatatggacaccaaatgagttgtataaattttctcaaaagatacaggaagcacgcttagcccaaattgcggtacaacaaggcaaacctatacattctaatttacaagcattatcagaccacaataaagtggctattgataatgacggtacatcaccaaacgagagaaaaaatcttagcccattaacacgtttttttaatgatcattttttcggcagctatgaacgtcgtagagacatgacaacggtgatgagaataaaaaatgaagaaaaaataacattaaaaggggatgcaggccgtcttacaggatcatattacagaggaaacgacaatattccagaagctaccgataagaaagtagtactatttttacatggttcaaattcccctaccgaaaaacaatcctctagtttttatcattattataaccaacaaggcatcgatatgttagcgattaacatgagagggtttggcgaaagcgatggctcgccaacagagcaaggaatgtatgctgatgcacaaaccatgttccgttatctcgttaatgataaaggtatcgatcctaaaaatattattattcatggttattccatgggggcaccaattgcggctaaattagccagcgatatttcagctaacggtcagcatatagctgggctattcttagatagaccaatgccaagtatgtcaaaagcaattgaatcttatgatgaatatagccttaagaaattgactggacaactcgcaaaaaaaatcaatggccaattctccgtagaaaaaaatctacagggtttctcaaaagatatccccattatattgctcactgactgtggcgagctgggcattggtggtgaaaaaatgcgcactaaattacttgataaaggatatctagttaaaggagaaagaaccgatgtttctcatttagagagccttaagttgatgaatcaatacggtaaacaaataatatcaagtttactatccccagagtatgtaaataacaccaatcacagaaatgcgttagattcgatacaaaacccgataaaaaagaataaggtgactgattgggggatggtatatgtaaaacccaatgataatgggggtgatagtcgttttgatagccagattattatccaaacagaggatgatccgatagtcgctcaagcagcttcggcacttgccgctaaacatgccaaaaatagtatcgtggtacaattggatgccgatggtcattaccgcgtagcttatggcgacccagcacaactttcaggtaaaatacgttggcagcttgttggccatggtcgtgaaacaaccgaaaataatcatttacgccttagcaactacaatgctgatgagctttccaatcaattggttaaattcaataccgtattcagcaaagaaaataatatcaatacaactcctgaacatatcagtattgtcggttgttcattaataagtaatgacaagcaggcaggatttgcccaccagtttatcaatgcattagatcaacaaggcattcgtagtagcgtttctgctcgagtaacagaggtcgccgttgatagcaatggtcacaaatacaccaaagataacaacggagagtgggtagccaaacaaacccaaaacaaggtagtgttagattggaataaagaaggcaaaatcacgactgaatttgagcaaatacataatggtgttgctgaaggtgatattgatttgactaaagtaggtgcttcagctgacaacaaagtacgtggcgcaattgcagataataatgaagtctttaccgcccccaaaaaaggtaaaaaatcaaccaaacaaagctcatcaggaagtgataattcatcactaagctattctggcaatatccaagtcagtgtgggtgacggcgagtttacaacggttaattggggaacctctaatcttgggatcaaagtaggtactggcggatttaaatcactggttttcggtgataacaatgtgatggtacacgttggtaatggtgatagtaaacatagtgttgatattgctggctatcaagctttcgaaggtatgcaattatttgttggtacacgtaacgtcagctttaatctggggcgtagtaatgatcttattgtgatgttagaaaaatcaattccaacccctccactgatcaacccttttgatggtgctgctagaatcaccaaagttctagagtcaatcgcatgctcaggtgaaaataatgataatgattggttgtcggtacaaaacgatcagtggacactcgctggcgctaaaaaatttgccatagatatgtcaggaatagaccaaacgagcaatgttgactataaaacactgactgatctgaattcacagaataagcgtagtagccgtggattaaagagtgatctagaagccacactaaacaaaaaatataaccagtggttaggtggtagtggcaataacaacgagatgggaaaaatcagccgagctgagcaacttcgtcaactagatagtaaaatcgcttttaatttcgccattggtggtcaaggtgctgatattcaagttactgccgggaattggaacttgatgtttggtgataatatccagtctattatagacactaatcttggctcattatttggcttaatgacgcagcaatttacagcaactggtatggtggaaaccacctttacttataccccccaaaacttaccaactaagttaaaaaataaattgctaggtcggttagccagcgtgagttcagacacgactctgggggatatttttggagtagactctaccacagatggaaaaataatctctcgtaatggtgagcccattgatgttgtcgctattttgaaagatatgctcgctgtagtgactgagtttggaggtgaaaaactgtccgcatttactgatccgactaaattattagataacctccaatcatctattaatctgggcaaggatggtattatttcatttgctgaaagccatggtttaaaagaaaaagcgacagaagatcaacaaaatgaatctgaagtttcaattaatgcccaaacaccaataacaacgagtcaaactgaaaatagcaagatcacagaggaaaatgatcgccctttcggcttcaattcgctaaatatccccaatctatttgccacaatctttaataaagataaacaaacagatatgcgtgatctcgcagaaaacctcaaagaaaatttagcagctgatgtactgaacatggagaagaaaacgctcgatttcttgcgtaatagtggtcatttaaaaggcgatggtgacatacatgtctctcttggcaactataatttcaactgggggggagatggtaatgatctcggcgcttacctaggagataataataatttttggggtgggcgtggttcagatactttctatgcaacggggatctcaaatatttttactgggggttacggaaatgatctcggcgtcttgatggggcgctcaaacatgatgtttggaggcgatggagatgacactgctattatcgccggtcggatcaataatgtctatttaggtgacggactcgataaagcatttgtctttggggaaggcggtgaaattcacactaatgcaggtaatgactatgttgtcactaccggtaactacaatcgcattttcagtggtagtgaacaagattttgttgtcacaattggtaaccacaaccaaatatccttagaagaaggcaatgattttgccaaaatttttggtaactacaataggttgaatggagggggcggtgatgacgaaattcaactaatgggttatcacgccgtagttgatggaggcgatggaaatgatcaactaattgcagcttcattctcgaaatttagccttcttaatggtaatacaggtaatgatattatcatattaggtggatatcagaaccacttcaaaggtggaaacggtatcgatagcttcctgattaataataatgtgattgattgttatatagacgatattagccaagaagataatattgtacttggagatattgattggaataaattatggtttgaacgcagtggctatgatttaaagatctcacatattcgcttcccacaaaatacaggggaacaagccacatttgagcgcattggctcaactacttttactgattatttcaatggtaatcaggcaaaaatcgttatcgcaatgactgataaagatcactctgatcagcgcgaatatacggctttatcaagcaatgcactcgctattcaaattcaggccatgagtacatttcctatgaaggcaggcgcatccggatttttcgataatataagtgatgaggctaaacaaatgatagccgtagcttggacagatacaatttcaggaaaaggcatattagtgtagtttagccatactctataactataataaatcctctccgttggatgtgaactgtgacgcgagaggtttttatcttaagagtactctcaatggaaaaataatatcgtatcaaattaaattcctatgttgtttaatccatcataatgaaaaaagagccaagctcataatgaacttggctcttaacatttacactttgtcttgattataaaatcaacttattttttctttttcgcttttggatttggcaggtcagtgatgctaccttcaaatacttccgcagccataccgattgattcgtatagcgttgggtgagcgtggatggttaatgcgatatcttcagcatcacaacccatttcaatagctaaaccaatttcacctaacagttcaccaccgttagagccgacaattgccccaccgataacacggttggtttctttgtcaaaaatcagtttagtcataccatctgcacagtctgatgcaattgcacgaccagatgctgcccaagggaaagttgctacttcatagctaacacctttctctttcgcttctttttcagtcataccaacccatgcaacttctggctcagtataagcgattgatggaataactttaggatcaaagtaatgtttcttaccagagataacttcagcagcaacgtgaccttcatgaacacctttgtgtgccagcattggttgaccaacaatatcaccaatcgcaaagatgtgaggtacattagtacgcatttgtttatcaacatggataaagccacgatcatcaacttcaataccagctttacctgcgtctaataatttaccatttggtacacgaccgatagcaactaatacagcatcataacgttgaggctcagcaggtgcttttttgccttccattgtgacatagataccatcttcttttgcttcaacggcggtcactttggtttctagcatcagattgaattttttgctgatacgtttagtaaagactttaactacgtctttatctgccgctgggataacttggtcgaacatttcaaccacgtcaatttgtgaacccaacgcatgataaacggtacccatttccaaaccgatgatcccaccacccatgaccagtaaacgctctggtactgttttcagttgtagtgcatctgttgaatcccacacacgtggatcttcatgtggaataaaaggtaattcgattggacgagagcctgcggcaacgatagcattttcgaaagtgattgttgttgtaccttcactaccttcaacagacaatgtatgtgagcctgtgaatcgagcttcgccgttaacaacatttactttacggcctttagccatgccagctaagccaccggttaactgagaaataactttgtctttccagatgcgaattttgtcgatatctgttttcggtgcatcaaaaacgacaccgtgttcagataatgctttcgcttcttcgattactttagcaacgtggagtaacgctttagaagggatacaccccacgttcagacaaacaccacctaatgtagagtgacgttcaactaaaactgtatctaaacctaagtcagcgcaacggaacgccgcggaataacccgcagggcctgcaccgagaaccactacctgtgctttaatttcagtactcatcgtgacctcattatttatttgtccggcgagtcagacgataatccatatttaacaccgagacttacataccgcatgcagtttacagaaatgttaataaactgaaaagcgctctaacatgacagatctcacaacctagaatgtatgactgcaaaatctgtcacggcaatcagagaaaccggcgcttagcaccggtttagatgattacattaccaaacgacgtaaatcgctcatgtactgattaatcagagtgataaatcgagcaccgtcagcaccatcaatcacacggtgatcgaaagataatgacattggtaacattaagcgtggtacgaactctttaccgttccagactggtttcatcgaagaacgagacagtcccataatcgcaacttctggcgcattaacgattggtgcaaaaccggtagtaccgataccaccaaggctagaaatagtgaagcatccgccttgcatatcagatgcagtcagtttacctgcacgagctttcttagaaacttctgctaattcataagagagttctaagatgccttttttgtttacatctttaaacacaggtacaactaaaccgttaggtgtatctacggcgataccgatattgatgtattttttcaggatcagtttctgtccatcttctgaaattgagctgttaaagcgaggcatatcagccagtgctttagccgctgctttcatcacaaagactaatggcgtgatcttaacatccagttttttcttctcagcttctttattttgctgtttacggaattcttcaacctcagtgatatctgcttcatcaaacagattaacatgagggatcattacccagttacggcttaagttagcgccagagattttctggatacggcttagttcaacttcttcaatttcaccaaatttactgaagtcaactttcggccaaggcaacatacctggtaatccaccaccagcattagcaggtgcagattcagcacgtttaattaactctttcacataagactgaacgtcttcacgtaagatacgtcctttacgaccggttcctttaactttcgctaagttcacaccgaattcacgtgctaaacggcggataacaggtgttgcatggacataagcttcgttttcaacaaattcttcttttgctgctggtgcagaagcaggcgcttttgctggagcagaaggtgctgctgatgtagatgctgcaggcgctactggcgcttgtgctgctggtgcggcaccggcaacttcaaaggtcatgatcagtgagcctgttttcactttatcaccgacagcaattttgatctcttttactacaccggcaaaaggtgctggaacttccatagaagctttatcaccttcaaccgtgatcagagattgctcttcagcaatggtatcacccactttcaccatcacttcggtgacttcaacttcatcaccaccgatatctggtacattaacatctttaattgcagaggctgctggtgctgatgctgcaggagccggagctgatgcagaaggtgctggcgcgctacctgctacttcaaataccatgataagagagcctgtgctcactttatcaccgacagcaattttgatctcttttactacgccagcaaaaggtgctgggacttccattgaagccttgtcaccttcaaccgtgatcagagattgctcttctgaaatggtatcacctacattgaccatcacctcggtgacttcaacttcatcaccaccgatatctggtacatgaacttctttcagttcgctcgcagcaggtgcggcagcagaaggcgcaggagcggcttcttgagcgggtgcctgagcaccctcttcagtatcaaagatcatgataagagagccagtttcgactttgtcgcccacggcaattttgatctctttaacaatacccgcttgtggtgatggcacttccatagacgctttatcgccttctacggtgatcaaggattgttcttcctcaatacgatcaccgactttcaccatcacttcggtgacttcaacttcatctgcaccgatatcagggactttaatttcaatagacattcactttacctcttacgccagacgtgggtttactttttcagggttgatgttgtattttttgattgcttcttcaacaaccttcacatcaatctcaccacgtttagctaattcgcctaatgcagcaacaatcacataagaagtatcaacttcaaagtggtgacgcagattttcacggctatctgaacgaccgaaaccatctgtacctaagacacgatagtcgtcagctggcacataagtgcgaacttgttctgcaaacagtttcatatagtctgttgaagcaacagcgggtgcatcattcatgatttgagcaatgtatggtacacgaggctcttctgatggatgtagcatgttccaacgttcacaatcttgaccatcacgagccaattcagtgaatgatgttacactgtacacatcggaaccaataccatattcagttgacagaatttgtgctgcttcacgtacgtgacgtaaaatagagccagaacccagtaactgaactttacctttcgcgccttccagagattccagtttatagatacctttacggataccctcttctgctccagctggcattgctggcatatgatagttttcgtttaacgttgtgatgtagtaataaacgttttcttgtttatcaccatacatacgctctaaaccatcttgcataatgacagcaacttcatacgcgaaggccggatcgtaagagatacagttaggaatagtcagtgattgaatatggctatgaccatcttcgtgttgtaaaccttcaccgtttagcgttgtacgacctgaagtaccaccaattaagaaaccgcgtgcttgttggtcacccgcagcccaacataggtcaccaatacgttggaaaccaaacattgagtagtagatatagaatgggatcattggcaagttgttagtgctgtaagatgttgcagccgctaaccaagatgcacccgcacccagttcgttaataccttcttgcaggatctgacctttaacgtcttctttatagtaagcaacttgctcacgatcttgaggcgtatattgctggccattcgggctgtagataccgatttgacggaacagaccttccataccgaaagtacgtgcttcatcagcaataatagggactaaacgatctttaatagatttgtttttcaacattacgttcaacgcacgaacgaatgcgatagtagtagaaatctctttagattgttcttctaataactggctgaaatcttccagtgtaggaatttctaatttttcatcaaaacgagtacgacgagcaggtaagtaaccttctagttcctgacggcgagcatgcagatatttgtactcttctgaatctttatcaaaagtgatataaggcagttctgctactttctcatcgctaacagggatattgaaacgatcacggaaatgtttcacaccgtccatgttcatttttttcacttggtgagcgatgtttttaccttctgccgtttcacccataccataacctttgatggtctgagctaaaataacggttggtttatctttggtttctttggctttttggaatgccgcaaaaactttcttcggatcgtgaccaccacggtttaacgcccaaatttcgtcatcagtcatatctttaactaatgcggcagtttctgggtaacgattgaagaaatgctcacgaacataagcaccgtcgcgagatttgaaagtctggtagtcaccatccagtgtttcattcattaactggatcagtttaccggaagtgtctttacgtagtagtgcatcccaacggtcgccccacatcactttgatcacattccagccagcaccggcgaagataccttctaattcgttaacaattttgccgttacctgtaactgggccatcaagacgctgtaagttacagttaaccacgaagcacaagttatctaatttttcgcgtacagcgatagtgatagcacctttagattctggctcgtccatttcaccatcacctaagaacgcataaacacgttgcttagtggtatcttttaagccacggtgatctaaatatttcaagaattttgcttgataaatcgcagatagtggccccaagcccattgaaacggttgggaactgccagaattcaggcattaatttagggtgtggataagaggataaacctttaccaccaatttcttgacggaagttatttaattgctcttcagtcagacgcccttctaagaatgcacgtgcgtagatccccggagagatatgaccttggaagtaaactaagtcaccgccatcattgtcattatgagcacggaagaagtggttaaagcaaacttcatataaagttgcagaagactggtatgacgccatgtgcccgccgagttccaaatcttttttggacgcgcgcagaaccatcattactgcgttccagcgaatagcagaacggatacgacgttccaattccagattgccagggtaagcgggttcatcttcaacaggaatagtattgatataatcactgtgtacagagccacctaaagcaatatcaagaccgccattacgggcttgttttaatacctgatcaatcaggaactgtgcacgctcaacaccttcttcacggatgaccgagtcgatcgcttgtaaccaatcgcgagtttcgatcggatccacgtcatttttcagcatatctgacatggtgtattccttatctgttatctgtttctaatggttataggagcctatcttcccgtgataccacggggatatgacgggaagataggccctgctgttattaccgctacccctgaatattgcagggagataggtagtacagactcagcggtcaggatctgtgctactaaaataaatcaggatgttgttggagccggcgtaaagaacgctcacgacgagtatgttcacgactcatatccaacaaaacatcttcaataaaggccagatggcggtgtgaagcttcacgggctgcttctggctctctattaataatcgcctgataaatctgtgtgcgatgctcacttacagcagttaacatctctttacgtgtataaagaaactcaaaattttgtcggatattctgctcaagcattggcaccatacaccttaataagtgtagcaaaacgacattatgagcagcttccgtaacgattaattggtattgcaataccgcatccgactccgctgcgatatcccctttatcatgagcatcaataatgcgagcatgactggctttaatacgctcaagatcatcatcagtaccgcgtaatgcagcataataagccgcaataccttcaagggcatggcgtgtttctaacagatcaaattgagattctggatgcccactgaggagttgagcgagaggatcgctaaagctttgccaaaggttatcttgcacaaaggttccaccaccttggcggcgtaataaaaaaccttttgcttccaatttttggattgcttcacgcaatgaaggacgcgatacatcaaattgctttgccagctcacgttcaggcaggagtttttcccccggacgtagggtgccttctaaaataagatgctcaagttgttgttctatcacatcagaaagctttggttggcggatctttgtgtaagccatattgctagaagccattattggataactattaccttggttattgaaatgtcaattggtaataccaatttaatgtaatggataataaagtaacaaagtatttactaactgtccatacagttgttgagcgaaatcataaaaacctgcaaattttaacaaattatttgataaattcatcaaatttgataactagatcgcattattagaaaagattaaaaacactattttttaacattgattaaacacataaacagtcacactgaagcgtgacagcattcatatattgattgtcaatgcaaaaatatcaattattaatgcattttgttgtgttattttgctaatagtgctcggtaatatgaccaattaaaatgaggtcccggatctgttttccgaccaggtgcgacatcactatgtccggtaatattttctttaatgcccggatagtgttcaataagttgctgagtgagtgtcgataattgctgatattgctgcggcgtaaagtcacactcatcggttccttctagctcaataccaatcgagaaatcattgcatttctctcgccctttatagaaggaaaccccagcatgccacgctcgtgccgtaaaaggcacatattgcacaatttcaccatcacggcgaattaaacagtgcgcagaaacacgcagatgtgcaatctcattaaaaaaaggatgatcatcaacagcaagcgtattggtaaacagttgatcaatataaggtccaccaaattgcccaggaggaagactgatattgtggataatcaacaatgaagggatttcaccttcaggtctattgtcataatttggcgatggaacgtgctttactcccgttagccagccttgcttaatctccacaacacccctcttttttctacatttaaaatcatattagctatttttattaataatatccgccaattaatgcgaacttgctctcaataatagtggttaattttgtatcacgcctttttcttttcgatattttactcaattcttagcttctctattcgccaataaaacgcttttttctcatacttcaataggttatttatcaaggagagaaaaatgaatacattaaattatcactcaacagagaatggattcacgctaatggaattgatgattgtgattgccattatctcaattttaagctcagtggcgatccctgcttatcatggttatatccaaaaagccgccttaactgatgtattacaaaccctgtcgccttatcgttctgcagtggaactttgtcactatgaacatcaatataaccaatgccatgctgatgccagttttatgcctcaacaatttcgtagtcgataccttactgatattcatgttgccaatggcgttattagtgcaaaaggtaaggctcaactagaaggactaaccatcgtaatgactcctgcagcaaacagcaaagagacacttccccaatggcaaattaactgcacatcaactaacactgcgttacaaacgctatgccataaggtttttaaatctcattaaaccaatctaacgacaacctcaaccaaggtggaaaagccaataggctctgtttctagcccttaccatccataaatcatttatcgtaaaaaagagctttcatgaataatactatccatacagcaacagagtttattgagcaattgttacgtcacagccttgctcaacgtgtttctgatcttcatttagagccacaacaaaatagcctgagaattcgcgcgagaattgataatcatctagtattattttctccccctgacaatcaattagctaacgagatcctgacacgtttaaaaatcctcgcgaatattaatattgccgaaaaacgcctaccacaagatggtcaatttaattggtcttaccagaaaaacaattattcaatacgtgttgcgacacttcctactttatatggagaaaaaatagttttacggctcatgaataatctgcaacagccacaattagcacagttaggttttcaaacaattcacctaacactattaaaaaaatatcttactcaacctcagggaatgattttagtcaccggccccacagggagtggtaaaactttaacactctatagttgtttacaatatttaaataaagataatcgtaatattaatagtattgaagatcctattgagttacctctccatggcattaatcaaacacaaataacagaaaaagctggtattacttttgcaacaatattacgggcgctattacgccaagatcccgatgttattatgataggtgaaatacgtgatcaacaaacagcagaaatagcaataaaagcggcacaaacaggccacctagttttatcaacactgcatactaactctacccaagcaacactcgcccgtttggctaatttaggcatcgcaaaagatttaatcgactcttgtgtaaaattaattatttctcaacgtttagttcgttgcttatgtagcaactgtaaatacccatcacctgaacagaaaaatttcattattaataatcaacaaattatattacccaattggcaagcaacaggttgtcaattttgttattccggctacaaaggcagaacagctatttatgattgttttgaacttgccaagcaatcactcccctcaccttacgcactatttaactcaggtattgaactgataaaaaaggggatcacgtctttagatgaagtttatcaagtagtcggagatattgaatgaaattacattttatctatcgctataatgcattaacttatcaaggaaaatggctaagtggcaacgttgtcgctcaatctaaacatgaagttattgatcaacttattcaacaacaaaaattaccagtaaaaattcgcctatatagggtaataatctttcaaaatagtgataaacaataccgcattcaacttcttgaacagttagcgttattacttcattcaggcttagcacttttgcccgcattaacactgcttaaagaagaatgtcgttatttacattggcaatgtgttttaaatgatattatttttcacctaaatcaaggaggcgcgctgtctaaacagttaagtcgttatccactctattttcctgctaatttaacccattttatttatattggtgaagagagtggtaagcttgatgaagttctcttattacaaacaacacaattaaaaaaccagcgggatttaataaaaaaaataataaaagcttttcagtatcctctattcttattattaacattaatcgttattacaatatctatgttgatctatgttttacctgaatatcaatctttatacagtgcatttaatactgagctaccgatgctaacattaaccttaattagatgttctcaatggttttctcaatatagtttaattatcctgctgtttatattaataatttcttatagctattacactattaaacaccatagtgctaaatttcgcgacattgaacaacgatgttggcttaatcttccttacttgggggtcttattaagatatcaccagctacatattatttttcagataatgacgattacacaacaagctggattaccactgttacaggggttaaaaattattacagagcaattaacgcattcactgtatcaacgagcactcactgatatgatagcgcatattactcaaggcaaatcacttagctcatttatgcgacataatcctctattcccgccaatctgttatcaattgatctcttcagcagaaaattctggacaactacagtttttttgccagcaacttacccactggttttatcatcaattagaagaacgtcttgatagtgtaaaaacatggcttgagcctattttaatgacactgatcgcattgattactggcacgcttattattgcgatgtatcttccggtgttacaactaggtgataccatacattgatgctagcaatatcctaaagtcattaacaatgcgtctaataatcaaaacatcagtgatacaatgcatcatcattacattttgatatattaatagccgattaagcgaagatttagccacttactgtaagctaggctgtcagggtagcagaaaatcgcttatcataataactgaataaaacccaaatattgcggttattatcttgtgataaaaatcagtttaagctttagaatatcgcaatcaacagtaaattttgattaattaaaaatagacgaacgcaatgacttatacagttgctcttacaggtggtattggtagtggtaaaacgaccatcgctaatggttttgcctcactcggcgtccctcttgtggatgcggatgtcattgcacgattagtggtagagcctgattcgccaggattaaaagccttacagcaacacttcggtgacactattttattgcctgatggcaagttaaatagagcgcaattacgtcatattatttttcaaaatcaacaagaaaaagcgtgggtaaaccagttactccatccacttatacaacaagagacgcaaaaacaaattcaacaaattcgcgccccttattttatttgggttgttcctttattagttgaaaataaactaacacatttagccgatcgtattcttgtggttgatgtgactgaagaagaacaaattaccagaactatgcaacgtgatggtgtaagccgagatcatgtactcaaaattttacaagcccaagctaaaagagaacaacgattagccgttgctgatgatattattgaaaatcacgataatagcttaaatcaagatgaacaaataaaacaacttcatcagcattacttagaattagctcaaaaaagcaatacaggacaatagccatgagtgaagaaacctcaacaattatttttgaacacccgcttaatgagaaaatgcgttcatggcttagaattgaaaactcattaattcaattaaatagttttcaatctattaattcattatcttctgcattatctttttttcgtgccgtttcagaatttattgaagttttagatcgcggggagatccgcgcagagctacttaaagagttagaaaaaagacaaaaaaaactgcaacagtggttatcctttcctaatgtcgataaagagattgtcagtcatattattaatgagttatcagaaagtgcttgcgcattaagtaaagcaccacgtattggacaacatttaaaacaagataaaatcatcagcttagtaaaacaacgcctcagtattccgggaggatgttgtagctttgacgtccctactttgcatttgtggttaaatcttcctcaaacggtgcgtactgaaaagttaacttgttggcaggaagggttatatcctctacaaaatgcattaaatgccctattaacacttattcgtcaatcagatacatttaaaccggtattaagccataatggtttttatcaagacagtacggaagaaggtgaattattacggatcaaactacttgccagccagcaaatttaccctcaagtctcaggacacaaaaaccgttatgctattcgctttttgcctcttgacagtgagcatggcacaatcccttctgaactaccttttgagatttcatgttgttaatatagcttaatatcaacaacagaaatcatctcaattaaattcaggagagataatgagcgaaaaattaatagtgaaatgcccaacatgccgaaccgaggtaatatgggatgaaagtagcccttatcgtcctttttgttgtaagcgttgccagttaatcgatttaggcgaatgggcggctgaagagaagcgaattccaagtcaaagcgaaagcaatgacagcgatgaatggagtgaaatgccagagcaagatcctaagccgtttaattaaacgcccacagcatactcatacagccacaacaatcatgaagtggctgtattgattatttttgcaataaggcaacaatagagcgattagctggcggaaaatcttcggcatttaaggacataataggtatccagcgggaaagttgcccctctttaccgtaaggtttattttcccactctgtgactaaaaagaatgataatgtaatatgcctatcaataaaatcatgctctaccgtttcaagcaactggcattgtgtcacattaatacctatttcttcttgcaactcacggtataatgcctgctctggcgtctctttatcttctagttttccaccaggaaactcccaatatcctcccatatgagatgtcaaagggcgttgggtaataaatacattattttgcttatcacaaatcacacctgcagcaatatgtagtttttttttatctatcataaacagccttattagatcatacgtttcactgacaaacttcaccattataccgtagatccaatagtatgaggttgattttctttcttcactattcggcatctgctcccccccctgatgaacgacccgcaaaagttggactcttttcgtttaaactcaatcatcactatttattaagataaataaatagtaaaagtataaatgcttttatattttatttattaaaatgaaataattattcacagaatgaatattttatataatgaaataaataaatcactgccaacaaatgaaaagtcgcttttaacttaattaaatattttcaaaaccgctctcagtattcttcttttttctctaaaaaacctattttttggttaattgattttttccaactggtaatttacatagcaaaaatcacaacaaatacaataacaataaaaattaaacaaatgattttatttgtagataacgcttattctctctaacaaaatcatactgattattttacgtttattgatagttaatactaaaaaaaggaaaagttttacttaaatccatcaattttaaaaatatattcaattaaagagtaactggtatttattatttttaatttcaatataataataaaatattatttattatctatatatattaaagccctattattatatttgaattaatacctttatctcgaggtaaaatgaaaaaaaaagttgttttattaacactattaagctgtttttctaccagtggattaagcgcaaatgaaacaggaaatttaggctcaatcagtgaatcaaggcgtgcattgcaagatagccaacgtgaaattaatcaattaatagaacaaaatcgctatcagcaactgcaagaaaaagcggtaaatatttcacctaccccaactttaattactgagtcagaacactgtttgcctataaaaggcgtttatattcaaggtattactttacttactgagaaggatctcaattcattatctccattaccagatcaatgtattaagagtgctgatattaatcgcctcgtgaaagaactcactcagcgttatcttcaacatggttatattactgcacgtatccaatttttacgtcctaaccaacatggcgaattaggtctgtatgctattgaagggtttgttgaacgtattgaaggaggtgatcgaggtgttaacaccacactactatttcctcgaatcaaagggcaaccattaaaactcgctacactcgatcaaggcttagatcaagctaaccgcttgcaatcaaataaagtcacagtggatattcttcccggtaccgaattggggggctctgtcattaagttgtctaatcaacgaaaatcaccttggcatctcaatatcgctagtgacaattatggacagaaaaattcaggccgctggttaatacgaacgaatgctagtttagatagcccattaggtttatctgattttgtaagcttaaatgccaacataacaacagataacccgaatacccgttttaatcgcgcttatactttgctctattcaattccttatggtggttttacttttagctcttttggtagttattcggagtaccaatttcaccaaaaattacaaacacgtactgtcagcttatatggcgataccactcaagtaggtattagaggcgattatgcttttagccgtagccaaaaacaaattgataccttaaatattcaagtcactcataaacgtatacgcaactactttagccaaattcgtttagatctcagtagccctaaattaaccacgattgaattagggattaatcatttgcagattattccaaatggcgtattgagcactaatttgagtgttgaaaaagcggtcggctggtttggcgcagaggaaacaccctatatcactaacggtaatggtaacgactatcgctttacaaaagttaagctatttgccaattggtatcaacgcttttctctatggcgttctacatttttattcaatagtacttttttaggccaatacagccacgatacactccccggcgttgaatggctaagtttaacagacaaaaacgctattcgtggttttgatcaaagcacactttctggtgataacggtggctatttacgcaataccctctcctatccctatcgacttaaccacttttctatcacacctcgtataggggtagatatcggtcaagtaaaacaacatggtaactacaaaggatggcaaggtggttacggcctaagctccggcttaaatattcaatatcaacaagcacaactcgaccttgaagttgcaaaaggcgagttactgtatcaccaaacaaattccaataaaaccaaagatcctactcaactactggttaaattttcatacttattttgatctacattcatagcaacaaatggagataactctatgaaatcaaaaaactttaaactttcaccctccgggcgacttgctgcgtctttagcaataatttttgtctctcttaatgcttatggtaatggcatcgtgcccgatgcaggccatcaagggccggatgtctctgctgttaatggcggtacgcaagtgattaatatagtcacgccaaataacgaagggatttctcataaccaataccaagacttcaatgttggcaagcctggggctgtatttaataacgcattagaagcgggacaatctcaacttgcgggtcatttaaacgctaacagcaatttaaatggtcaagctgcctctttaattttgaatgaagttgttagccgcaacccatcattcttattaggtcagcaagaggtctttggtatcgctgctgaatatgtgctttctaacccaaatggtatcacatgtgatggttgtggttttataaataccagccgctcttcattagttgttggtaatccgctctttgaaaatggtcagctaaaaggctatagcaccctcaacaacaccaatttactatcacttggtaaaaatggcttaaatacaacagggttgttagacttaattgctcctcgtattgatagtagagggaaaatcactgccgctgaaatttcagcctttactggacaaaacaccttctcacaacattttgatattctctcttcacaaaaacccgtttcagcattagatagctatttctttggtagtatgcaatcgggtcgtatccgcattattaatacggctgaaggtagtggagttaaattagcaggtaaatttaccgcagataacgacctaagtgttaaagccgataatattcaaacagatagtcaagtccgttatgacagttacgataaagatggcagtgaaaattaccaaaactatcgtggcgggatcacggttaataatagtggctctagtcaaacactcactaaaaccgaattaaaaggtaaaaacatcacattagtagcgagtagccataatcaaatcaaagcctctgatttaatgggggatgatatcacgttacaaggcgctgatttaactatcgatggtaaacagctacagcaaaaagagaccgatattgataatcgctggttctactcgtggaaatacgatgtgactaaagagaaagaacaaatacagcaaattggtagccaaattgatgctaaaaataatgcgacattaaccgcaactaaaggagatgttaccttagacgcggctaaaattaatgcggggaataaccttgcaattaatgccaataaagatatccatatcaatggattaattgagaaagaaagtcgtagtgaaaatggcaataaacgtaaccatacttctcacttagaaagtggtagttggagtaatagccaccaaactgagacgttaaaagccagtgaattaacggcaggtaaagatcttggtttagatgctcaaggctcaataacggcgcaaggtgctaaactgcatgcgaatgaaaatgtgctggtcaatgccaaagataacattaatttaaacgtccaaaaaaccaataatgataaaacagtcaccgataatcatgttatgtggggaggtattggtggtggtcagaataaaaataataataatcaacaacaagttagtcatgcaacacaattaaccgctgatggtcaattgctccttgctgcagataacaatgtcaacattaccggtagccaagtaaaaggcaaccaaggtgcttttgttaaaaccacacaaggtgatgtcgtcattgataatgcgctgagtgaaaccatcagtaaaatcgatgaacgcacaggaaccgcgtttaatatcactaaaagttcacataaaaatgaaactaataaacaaacatctacaggtagtgaactcatttccgatgcacaattgaccgttgtcagtggcaatgatgttaatatcattggtagtttaatcaaaagtgctgataaattaggtattcattctttaggtgatatcaacgttaaatcagcacaacaagtcactaagattgatgatgaaaaaacatcattagccattactgggcacgccaaagaagttgaagacaagcaatatagtgcgggctttcatatcactcataccaccaataaaaatactagtactgaaacagagcaagctaactcaaccattagtggtgccaatgttgatctgcaagcgaataaagatgtgacttttgcgggatctgatctaaagactaccgcagggaatgcctctattacgggtgataatgttgcctttgttagtacggaaaataaaaaacaagcggacaacacagataccactatttcagggggttttagctacacaggaggtgtagataaagtcggttctaaagccgattttcaatatgacaaacaacatacacaaacagaggtaacaaaaaatagaggcagccaaacagaggttgcaggtgatttgactattaccgcgaacaaagatttgcttcacgaaggggcttctcaccatgttgaggggcgttatcaagagtctggtgaaaatattcagcatcttgccgtcaatgatagtgaaacatctaaaactgacagcttaaatgttggtatcgatgttggcgttaatcttgattatagcggtgtaacgaagccagttaagaaagcaatcgaagatggtgttaacacaaccaaaccgggtaacaataccgatttaactaaaaaagttacagcaagagatgcaattgctaatttagctaaccttagcaatttagagacccccaatgtcggtgttgaagttggtattaaaggtggtggtagtcagaaatcacaaaccgatagccaagccgtttcaacctctatcaatgcaggaaaaatcaacattgatagtaataataagttacatgatcaaggtactcactatcaatcaacccaagaaggtatttctctcacagcaaacacccacacaagtgaggtcgcgcaagataaacatcaaacgacattccatgaaacaaaaggcggtggacaagttggtgtcagtactaaaacgggcagtgatattaccgttgctattaaaggtgaaggccaaacaactgataacgccttaatggaaacaaaggctaaaggtagccaatttacctcaaatggcgatatttcgattaatgtaggtgaagatgcccattatgaaggtgctcaatttgatgcacaaaagggcaaaacagttatcaatgcggggggtgatctcactcttgcacaggcgactgatactcatagcgaaagtcaatctaatgttaatggtagtgcaaatctgaaagtgggcaccacgccagagagtaaagactatggtggaggtttcaatgcagggacaactcatcacagcaaagagcagactaccgcaaaagtgggcgctatcactggctctcaaggtattgaattaaacgctgggcataacctgactttacaaggtactcatttaagtagcgaacaagatattgcattaaatgcaactaataaagtcgacctacaatcagcgagctctgagcgtactgaaaaaggcaataatttatctggaggagtacaagcaggttttggtaaaaaaatgaccgatgatgcttcatctgtgaatggtttaggtagtgcccaatttgctattggtaaacaagatgagaaaagcgtatctcgagaaggaggaacgattaataactcaggaaacttaacgattaatggcaatagcgtccatcttcaaggagcacaagttaatagtaaagatactcagctaacatcacaatccggtgatatcgagatcacatctgcgcagtctactgattataaaaacaattggggaacagatattggctttaatggcaaaaaaaccaataccaccccaaaagaagttacagaggagaaacctgctacctctattcataacatagggggtaaattactggttaatgtggaagatcaacaaaaaacgagccaccaaaatgcaaccttagaaacaggtacattaacgattaatagtaataaagatctgacactatctggtgctaatgtgactgctgatagcgttacgggtaatgttggtggttcactcaatattgctagccaaaaagagagtgatcgccatgtcactgttggcgtcaatgttggctataaccacaccaatgatcctaaatcaagccaagtgaataaaacggctaaagccggagggtcattattagagaaaactatcaaagatacgattgattcaggaattaaatcatcaaccgatgctatctctgataaatacaattccctctcttcaactattgcagataaaacaggtatcagtgatgaaactaaagccaaaattgatcaaggttttggtaaagttggtaatggtattaagaatatcgtcacaggtgctgaaggtcatactgctaatgcagatatcaaagtcactcatgtagataatgatgctgtcactaaaaccacctccttaactagcaacaacgacctatcattaaatgtgaatggctcgacaaaactcaccggagcagaaattgcgagtaaacaaggccaagttgatttagggggaagtagcgttaaattagaaaatattgaaggacatcattatgaagccggcgctgatcttggtctgaaatcctctgtggtggatttagcaaaacaactggtaggtggagatatttcttttaaatcccccgttaaaacgaatgaaaccgtcaatacaaaagcatctatttctgaaaaatagtcgatacttcataaaagagtaactgcctattttttgtaagctaagcccacttgattgtcattattacaagtgggctttttattatcacacttatgacatctgctcccgataaacttacaattctttaatatttaaaataagccaaaaaaaataacccattgaatataaacaaaataaaagcaaacaaaataattatataatccttgaccttcccctaatggtaaagcttaagctttgtcccataccatatttaagagggaaagtttgatgaatacacctacaacattatcctcagcaaataggctgagcttacctgtagaaggtatgacatgtgcttcatgtgtcggacgtgttgaacgagcattaaaggcagtacctgaaataaaagatgctgccgtgaatcttgcaacagaacgtgctgatattacatttagcagtacccccaatcctgtacttgctgtaagcgcgattgaaagctctggctataaagttcctgaagagatcactgaattagctattgaagaaatgacctgcgcttcctgtgtcgggcgtgttgagaaagcattagctcaaattcctggtgtattagaagccaccgtgaatcttgccactgagcgtgctcatgtgcgtcatttatccggcgtagtatctattactgatttagaagtggcggttgtccatgccggttataaaccacggcggctatcagataatccagccaatactcgtgatttaagtgaagagcgtcgtgaaaaagaagcccgctcgttacgccgagcattacttattgccactatcttcacattaccagtgttcgttattgagatggctcacattttatccccggagtccatcattgggtaacgcaaacattagggcaacagctcaactggtatattcaatttgttcttgccaccatagtgatgtttggccctggcttacgctttttcaaaaaaggaatacccgcattattacgcggtgctcctgatatgaactcattagtatcagtcggtacagtagccgcttatgggtattctgtcgtttcaacctttataccccaagtcttacctgcaggtacggcaaatatctattttgaggctgctgtcgtgattgttaccttgatcttattagggcgaaatcttgaagcaaaagccaaaggaaatacctcacaagcgattaagcgtttagtgggtcttcaagccaaaacagcacgtgtttcacgtcatggtgaaatactagaaattccattagatcaagttatgatgggcgatatcgttgttgttcgtcctggtgaaaaaatccctgttgatggtgaggttgtagaaggccattcttatgttgatgaaagcatgataaccggtgaacccgttcctgtagcaaaagagataggggctgaggttgtcggtggcaccatcaataaaacaggcgcttttagttttaaagtgaccaaagtgggtgccaatacgatactcgcacaaattattcgcttagttgaggaagctcaaggttcaaaattaccaatccaagcgcttgttgataaagttaccatgtggtttgtacccgcagtaatgataggtgcaacgatcacattctttatttggctcgcatttggtcctgagcctgcactaacctttgcgctcatcaatgctgttgcggtactcattattgcttgtccgtgtgcaatgggattagcgacaccaacatcaattatggttggcacaggacgagctgctgaattaggaatacttttccgtaaaggtgaagctttgcaagccttacgtgatgttagtgtggtcgcactcgacaaaactggtacattgacaaaaggccgccctgagctaactgatctgatcccagcagaaaaatttgaatataacgagatattaagtcttgtcgcttcaattgaaacttattcagaacatcctattgcacaagcaattgttaatgcagcaaacgaggcaaaattaacgcttgctagtgtggataattttgaagctattcctggttttggtgttagtgcaacagttgatggaagatctgtctctgtgggtgccgaccgctttatgaaacagcttgggttagatgtcagtcagttcgcttcatccgctcaaaaattaggtgagcaaggtaaaacaccactgtataccgccattgatggccgtcttgctgcgattattgccgttgcagatccaataaaagaaacaacacctgaagctattaaagcattacatgcattaggtttgaaagtagcaatgatcacaggtgataacaaagcaacagcaaaagcaatagcaaaacaacttggtattgatgaaatagttgcagaagtccttcctgatggaaaagttgcagcattaaaacaacttagtcagaaaggagataaagttgcatttgtcggagatggtatcaatgatgccccagcgcttgcacaagctgatgtaggattggcaattggtacaggaactgacgttgccattgaagctgctgacgtagtactaatgtcaggtgatttacgcggtgttgttgatgcgattgcacttagccaagcaaccattcgtaatatcaaacaaaacttattctgggcatttgcttataacgcattattaatccctgtcgctgcgggcatgctttatcctatcaatggcatgttactttcgcctatattcgctgccgcagcaatggcgctttctagtgtatttgttttaggaaatgcactacgactaaaacgttttcaagcgcccatgaaaacacattaaacataaattatctttattgccagatccgaaaaagatctggctcatgctgataaagcaattatctctacttagaagaaaagcgctttattatcagataaggagaataagatgaatattggtcaagctgcaaaaaaatccggtatttcaagtaaaatgatccgatattatgagcaaattggtttaatacctaaggcaattcgtactgacggaggttatcgcgattacaatgatagcgatgtagattgttttcgctttatccgccattcacgtgctcttggtttttcaacagagcaaatatcaacattattagttttatggaataacagagaacggacaagtgctgatgtaaaagctattgccctttctcatatcgatgaattaaaccgtaaaatagcgcaattgcaacgaatgacgcaaacattatcgcatttagcacaagagtgccaaggtgataataatcctgattgcccaattattgctaagctagtcgaaccccaaacagggacagaacattaaacaacaaaaaaacaacctttattacctccactctcctattttatggttttttatccatgataaaaaaagcccacctttattcgaaggtgggctttctatttttaaaatggtgttacattcttacccatataataagcaataagtaattaacctaatttaccgtgacaatgcttatattttttacctgaaccacaagggcaaggttcgttacgacccacttttttgcctgatgccacttgaccatcaacggcagacatttgtgattcttttgtcacttcatggctaagttgttgctgtttagctaaacgctccgcctcttcacgacgacgacgctctaactcttcaacttcttcaggtaaacgaacttgtactttacttaatgtgctgatcacttcatatttcagtgattccaacatattagcgaacatagcaaaagattcacgtttgtactcttgttttggatctttttgtgcataaccacgtaaatggataccttgacgcagataatccatcgccgctaagtgctctttccacagtgaatccagtgtttgtaacatgacacctttttcaaagttacgcatcatttcagcactgacaatctcttcttttgctttatagacttcgattgatttttctaaaatacgttcgcgcagtgtttcttcgtgtagttcaggctctttatctaaccactctttgataggtaaatttaaatcaaagtcattttgcagacaggccgttaaaccttcaatatcccacatctcttctaatgattgaggtggaatatagttatcaatcatcgaagtaaacacatcttggcgaatactgtcgatagtttcactgacatcagcaacatctaacaactcattacgttgagtataaatagctcgacgctgatcattggctacatcatcatactcaagtaattgtttacgaatatcgaagttacggttttctactttacgttgtgcattagcaatcgctttagttacccatggatgctcaatagcttctgtttcgttcattcccagtttacgcatcatgcctgatactttatcagaggcaaaaatacgcattaaggagtcttccattgacagatagaaacgagaagaaccctcatccccttgacgccccgcacgaccacgtaactggttatcgatacgacgtgattcatggcgttcagtaccaataatatgtaaaccaccagaagctaataccgcatcatggcgtttttgccattgtgctttgatctcttcaatttgctcttctgttggattttccagcttcgcaacttcagtctgccaacttccccctaatacgatatcggtaccacgaccagccatattagttgcgatagtcaccgctgatggtaaccccgcattagcaatgatatctgcttccatagcatggaatttggcattcaggacattatgatgaatattcgcttttgtgagtgcttgggagatctcttcagatttttcaatcgagatggtccccaccagtaccggttgtccatttttagtacgttcacgaatatcttcaataatcgcggcaaatttacctttttcattcatataaactaaatcaggtaaatctttacgtaccattgggcggttagttggaataacgatagtttctaaacggtagatagagttaaattcaaaagcttcggtatctgcagtaccggtcatccccgctaatttctcatataaacggaaatagttctggaatgtaatggacgctaatgtttggttctcattttggatcttcacaccttcttttgcttctaccgcttggtgtagaccatccgaccaacgacggccttgcatggtacgaccggtatgttcgtcaacaatgataacttcgccatctttaacaatgtaatcaacatcttttgtaaataatgcatgggcacgtaaggctgccgttacatggtgcataagcatgatgttagcaggtgagtaaagtgactcgccctctttcatcatacctgcttcggctaatagcccttcaattttaactaagccacgctcagtaatattcacttgacgcgttttttcgtcgacagagtaatccccttctccttggaaggtatctgaatcttctttttcttgaggcactaaatgaggaataactttattcattttaatataaagttcagagctatcctcagcaggccctgaaataatcagtggagtacgagcttcatcaattaaaatcgagtcaacctcatccactaatgcatagtgtaatttacgttggacacgctcttcagggctaaacgccatattgtcacgcaaatagtcgaaaccaaattcgttatttgtaccgtaagtgatatctgcgttataagcttcacgttttgctggtggtgccatattagggaggttgataccaacacttaaccctaagaattcaaatagtgggcggttattttccgcatcccgttgcgccaaatagtcattgacggtaacaacgtgcacccctttacctgatagcgcatttaaataagcaggcagtgttgcagttaaggttttaccttcccctgtacgcatctctgcgatacagcgatcatttaataccataccgccaataagctgtacgtcaaagtgacgcataccaaaaacacgtttactcgcttcacgtacagtggcaaaagcttcaggtaaaatatcctcttctttttcacctttttttaaacgctcacgaaattcatctgttttggctttcaattcatcgtcggttaatttttcaaattctggctctagttgattgatttgagcaaccactttacgcatacgacgaatagcgcgttcattacgactaccaaaaattttggttacaattttacctaacataactctttattctcatttatggcgtaaatacgccgaatacagcctctatgtttatcgacgataaatcatagagataagcataatctaacaaagattaacaaactcaattaagctgttaggtaaggtccagcacggataccacggatctgagcaagccataatccggtatgataggaaatacgattttccgttaacacgccacgggaaatcggtaaattaactagggtagaagatggcgcttgagtcagtaacgcataaagcgtatcaagcatgacctcagcaacattcgcaacaggtgatggctcatcttttgcttttaccatcaattcaggtgaatgaatggtaaaagcaaaagagagctgcttaatcacatttttaacggcatgctgttgccagtaattaaaggtgaaggatgaagcaggattctgtacactctggcgtaagaataaattatcaaaagcgattaatgcttggctttgacgattttgtgaggaaggtgtatccgtttgtgatggattttcagcatgggcagacaccagcgaaggcataccaatacctgctgctaccatccctaatagcagatgcgaccaaaaatatcgtctgccaaattgtcgccaaaaatttataatgctcattaaccttcgttatttaattttataatttgtggagtcaaaatctatgcgggatagctacccacaatcattggaaaacatcctaaaagagcttgaaggttccaataaaagcacattacagcttatacaacagcgtgcaacaattttactcaaattaaatcgtaccgtcatggcacttttaccagcaccgttacaaggtaaatgccgtgtcgccaattatcgcaatgctattttaattattgaagtcacaaacgcaagttggatgacccgattacgttatgaaattccatcattactttctgcattaagaaaggaaattttaccatcgttatcctcaatagacatcaaaataaatccttctttaagcataaaagcgggaaaaaagagtgtcacttcatcattaaaagatccaacacccgtaaaaaaacgccatttaagtgtagagagtgcacaatcattgaaatatttggcagagaaaagcccgaagaaattaagagaaagattagaacggttggctgcacttgccggagagagtacaagtacagccaaagatgacgctaattagagataattaacgtgctttccaattgagcgattaagcaaaaactgtcgatggcgctttaaatgccactggcattttcgcttcgtcttcaaaggtgacgaattcccaagcagactcttttgctaaaacagcttggagcaatttattatttagtgcatgacctgatttaaacgcggtaaattcaccgataatgttatagccacacataaataaatcaccgattgcatctaacattttatgacgaacaaattcgtcttcaaaacgtaaaccatcatcgttgaggacacgatagtcatcaaccacgatagcgcaatcaaagctaccgcctaaacacaatcctttcgattgtaaatattcaatatcacgcataaatccaaatgtacgagcacgacttatttgactcataaaggattcagcagagaaatctaatttataacgctgagtacttgcatcgatagcaggatgattaaaatcgatagtaaaatctaatttaaaaccattataaggacgcatttccgcccatttatcgccatcttcaacacgtactgtttccttgatacggatgaattttttcgcagtgcgaagctcttcaatacctgcatcaagcaataagaaaacaaaaggtgctgcactgccatccataataggaatttcaggtgcatccacttcaattacgatattatcaatgcctaaaccagccagtgctgcatttaaatgctcaacggttgatatacgcacatcatcttcattcactaagcaagtacataacatagtgtcacgaactgattttgcgtctgctggaaaatccaccggtggatttaagtcagtacgacggtagatgaccccagtattagctggcgccggacgcattgtaagcgtaacttttttacccgtgtggagccccacaccagttgcttgtacaattcgttttaatgtccgttgtttgatcatcattttatctcgcaatattatccgtcctaccaattattatacttataattggcaggacagtttagcacaaaaagcggagatgccaatctttttgacgattaatcagcctgttttcttaagaaagcagggatatctaaataatctggctctttgttagcttgagtagattgttcattaaccgctttagctgcaggcttgctctcttctactgtagagaaagaggacatgctattttgcatttgctgataacgattttccatagcgttttgttgattttgcttattagttaccagcgtaatttctggacgtttatccatgccgatacctgtagcaaccacagtaacacgcagttcatcgttcatttcagggtcaagagaagtaccaatcaccactgtggcgttatctgatgcaaatgcacgaatggtgttaccgacggtttcaaactcatcaagacgtaaatcaaagcctgctgtaatattaactaacacaccacgtgcgccagacaggtcgatatcttccagtaatggacttgaaatcgccatttcagcggcttcttcagcacgatcttcgcctttagctgcaccagatcccatcatggcataacccatctctgacatcaccgttctcacgtcagcaaagtcgacgttcatcaaacctgggcgagtgatcagttctgcgataccttgaacagcaccttttaatacatcatttgccgcaccaaatgcgtcaagtaacgaaataccacggccgagtacttttagcagcttgtcatttggaatagtgattaatgagtcaacatgcttagataactcagtaattccctgctcagcaaatgccatacgctttttgccttcaaaattaaaaggcttagtcacaacagcaaccgttaaaatacctaactctttcgccacttcggcaacgactggcgcagcaccggtaccagtaccaccgcccatacccgcagcgataaataccatatccgcaccttctagtgcagcgcgtaacgcttcacgatcttcttcggcagcattacggcctacctcagggtttgcacctgcacctaagcctttcgtaatggcattaccgatttggatagtttgtccaactgctgttttacgtaatgcttgagcatcagtattgaccgcgaagaaatcaacgccttcaatacgttcacgaaccatgtgctcaaccgcattaccgccgccgccaccaacgccgatgactttgatcaccgcatcgttggttaattccataggttcaaacataatttctctccgttttgtgccttttagggtcgcttgctcaaacgacctctttttaaatttgtctgatgattaaaactctctttttaaccagccagtgagtttttttagccaaccactaactgcagagcgtttttcggtttcagtttcctcaccaaagtgagattctttaccgtaatgcaaaagcccgactgccgtagaatagaagggatcctgcgcataatctgttagcccggtaatatttaacggtttaccgatccgtacttgcgtgtggaaaacacgttgagcacattcaacaagtccatctatttgtgcagcaccacctgttaaaacaatacctgccgctaaatggtgctttattccttgctgacgtaattgttcctgaacactcaaaatctcttcattaacaagatttaaaagctcggtataacgcggttcaatcacctcagcaagtgtttgccgttgtagacttcttggtggtctacctccgacacttggaacttcgacattttcatctttgccaactaaagagcctaatgcacagccatgacgcacttttattgcttcggcatcatttggtggtgtaccaaaagcgtaagcaatatcgctagtcacaacgttgcctgcataaggaatgacacgagtatgtcttaatgcaccaccggtatatatggcgatatccatggttccgccacccatatcaacgacacaaacacctaattcgcgctcatcttctgttagcacagcaaaacttgaagccagtcctgcaaaaatcagttgatccacttttaaaccacagcgctcaactgcttttactatattcttcgccatatcgttatggcaggtaatcagatgtactttagcctgcatacgtacaccagataacccaacagggtttttgatcccttcttggtaatcaatggcgtactcttgcggtattacgtgtaaaacacggtgttcatcttttactttgacggatttcgcagtatgcaccacgctatcaacatcatcttgtgttacttcttcttctgaaattggcaccataccaatttcattttggcagctaatatgtttgcctgataacgccaaatatactgacgatatttggcaatctgccatcaattcagcctgatctacagcccgttgtacacattttacgacggattcgagatcgttcacgccacctttgtccataccccgagatgggcaacttcccaccccgataatattcactacgccatcaggcaggatctcaccgacaagggtggctactttggccgtaccaatctcaagaccaactactaattttctgtccgtcgctttgatcattattgttctgccttcgccttcatcgtgtcatctgccacgtcttgtttattcattcacatcaagtaataaaggagcccatccaactgcaccaccactgtcataacgtaaatcgacataatcaacccgtttgtcagtctgttgttgcaagataggatacagctcaataaagcgagcaatccgtttttcggtatccttacgccctaactccaatcggacatcattgtctaagactaattgccatccttgacgagctgacattgatgctgcttttaatttcagattactggcaagaagctgatctctcattgctaaataacctgctaataccattttctcacttccttgcggcccatataatagtgggtaatttccttgtgtttccaatcgcgttggcagactgaaaattcggccttctctatcaagaaaatgtgtgtcattccaacgggtaaatggcacatactccaccagatggatttttaattcgtctggccattgtttacgtacggtcacttgcctgatccatggcatacgttcaatttgttgctgaatgatattgacatcctgtgtcataaaagtgcctggttggcctaaagataaaatggcctgacgcacatcatcattcgttgtgtaatgccgctcaccagtaagtacaagctttgatatcggtagacgattagcatctttcatccaattcacaacttgtattccgccccaaataatggtggcaatcacacataagaagaagattaatcctgataaatagctaccattactcggtctatcagaatgacgtttctcttttatctctttattatttagcgctgcttgtgacatagtaaattcattcacccctgcgcaacattcaaataagagaatcggctattcttttgtacgatattcctacgattaatacttccactagatatatatactctataaatacctttagctttgataattaaatcactaaattgttcaatctgttgagaattatttaccttaaaagtcaaaatagcgagtttttctttaaatttcgctacttttaactgataaatttttcccacatctctttgagcaagcaaattaccgatcgtatttttcgcaaataagatctctttttgactaaaatctcccaccattacagtcattttcttaaccatttcaccataaatgatgttcacttgctcaaacatccgtcttaatcctcgcttaaagatggttgtaattttgtttctgctaagcgacgcgctattttaccaatatttccagcaccttgaactaaaacaagatcattatctgttaatacacccgctaatattgaggagatgttctcaacatcagaaacccaaatcggatctagtttgccacgttgacgaatagtacgacacagtgaacgactatctgcaccgggaataggcgcctctcctgctgcataaacatcggttaataataaaatatcaacttgattaagcaccgttgcaaaatcttcatataaatcacgagtacgtgtataacgatgtggttgaaataacatcactaaacgtttatcaggccaacctgctcgtgccgcttttatcgttgcatcaacttctgttgggtgatgtccatagtcatccaccagcatgacttccccttcttggccattcacatgctcaagactgaaatttcccaagaaatcgaaacgacgcccagtgccttggaaattaagtagtgcggctaaaatatgctcatccgcaatcccttcttctgtagcaacagccacagctgcggttgcatttaaggcgttatgacgtcccggcgcatttaataccacatctaaatcaggcatatcttcacgagaaatagtgaaaaatccttgcgcacctttttgttcgtaatgagtaatgcgtacatcagcatcttcactaaaaccataggtagtaatataacgccctactttaggaataattgaccgaataacatcgtcatcaatacacatcactgcgcgaccataaaacggtaagttgtgtaaaaaagtaataaaagtctcttttaaattatcaaaattaccgtgataagtgtccatatggtcagcttcaatattcgttaccaccgcaaccataggttgaagatgtaagaaagaagcatcactctcatccgcttctgcaattaaatagcggctacaacctaaacgagcatgggtaccggctgatttcactaaaccgccattaacaaaggttggatctaatcctgcttgtgcataaatgttcgaaatcatcgccgttgttgttgttttaccgtgggttcctgcaatcgcaaccccgtgacgataacgcattaactccgctaacatttctgcacgacgtatcacaggaatacgcgcttctcttgctgcaataatttctggattatctgcactaattgcggtagaaaccaccacaacactagcatcacgaatattttcagggcgatgattaaaatagattgtcgcccctaatgcaacgagttgttgtgtgactacgttaggtgctaaatcagaaccactgattgcatagccttcattagccaacacttcagcgatcccgcccatgccagcaccaccaatgccaacaaagtggatatgcctaacttttctcatctcaggcacaaaagatcttaatttcgccagctgttgtgtattcactatttacttcttcactctaagttaatggttacaagttacgtttattttttagccacttcgataattacattagcgactcgctcagtagcatccgtaatcgcaacactttgtgctttttctgccattagcattagctgatgtctatcccaattttctagggtgtcagctatcgcttctggcgttaaatcattctgttcaataatacgcgccgcaccggcattttctaatggcaatgcattccaatattgctgtctatctttatgttgaaaaggaacaaaaatagcgggtaaccccgcagcggcaatctcgctaactgttaatgcacctgaacgacatacaacaacatcagcccattgataagcttgcgctatatcatcaataaattcagtaactttatactcagatttaactgaatttttagaaagttcattttgatagcgtaatttggtatcactttcgctccctttgccggcctgatgccaaattgtaactcgctctcctaataatccagccaccactggcattgtatgatttaagatacgcgcaccttggctaccaccaataaccagcactcggacagcaccttctctgccttttaatctctctgctggggcttcaagtgctaagacatcgtcacgaaccggattaccaacaacaggcgcattagcaaacgcaccggggaatgcttgtaacacacgtttggctatttttgacaaccaacggttagttaagcctgcaataccattttgttcatgtaaaacaacgggaataccacagctccatgctgcaacaccgcctggtccagaaacatagcctcccatgcctaatacggcatcaggctgatagcgcttcataatccgacgggcttgaaaaatcgcttttataatacgaataggtgccgcaattaacgcttttacccctttacctcgcagacccgaaatacggatatactcgatttcaatgccatgcttaggcactaattgtgcttccattctatccgcggttcctaaccaacgaatatcccagccttgggattgcagataatgagcaactgctaatccaggaaagacgtgccctcctgttccgccggccatcaccattaatcggcgtttacgttcgctcatttaggactccttacaaacgcctgagcctgtgctaggcgtgattcataatcaattcgtaacaacatcacgatagccgttgacataataatcaaactcgaaccaccgtaactaataagaggtaacgttaacccttttgttggcaacataccggctgccgcaccaacgttgactaacgtctggaaggtaaaccagatcccaatcgaacaggctaaaaaacctgaaaaacgttgatcgagcagcaaagcacggcgtccaatttgcatcgcacgaaaagcgatgaagaataccattaaaagcactaaaaccacaccgatataaccaagttcttctgctaaaatggagaaaataaagtcagtatgagcttcaggtagatactccaacttttgtactgaatttcctaacccttgccccagtagatcaccgcgtccaaaagccatcaaggattgtgttaactgataaccactaccaaaaggatcttcccaaggttctaagaacgaagtgatacgtcgtacacggtaaggctcaacaataattaacatcacaacagcggcaatacctgtaccaataatggcgaggaattgccaaatttttgcaccggctaaaaaaagcaacgctaatgtggtcacaaacaacacgaccaccgtacctaagtcgggttgtaatagcagtaacacggctaatattaacatcacccccataggtttacagaatccccaaaaattgtttctcacttcttctacttttctcaccaaataactggagagataacaaaacagtgccaatttagaaagttctgccggctgaatacgtaaaggcccaaatgcaatccaacgtgatgcgccatttactgaactgcccactgccaataccacgagtaatagcaagatagaaccaaacagcattaagctactgtagcgttgccataccgccattggcactcgcattgttactaatgcaaggcaaagggcaacaatcatataaatgccgtcacgtttagcaaatagaaaaggatcttctgctaaacgttgtccaacaggcattgacgccgaggttaccatcacaaacccgacaaccgctaatccgaatgtaaaccagagcaaagtgcgatcataaggcacgaacgcgctgttatctgtttgataacttcccaccagccactgttttaatcttcgcattgcgtatacactcatcagccaagctcctgcgctaaacgggcaaactcatcaccacgttgttcgaaacttttaaactgatctagacttgcacaagcgggtgaaagtagcaccatatcgccagtttgcactgttggtgcaagtaatcgcatcgcctcttccatagtcgcggttaattgtgagacttgtggtcgtaaatttgccaatgcttgaccatcttgtccaaagcaatataagcgaatattatcgccactgagataaggtaatagcgcgctaaaatcagcagacttaccgtccccacctaacaacaggtgcaaagtcccttctacttcaagccctcttaaagctgcttctgtgctacctacattagtcgctttagaatcattgatccaacgtaccccattatgggagtaaactaattggaaacgatgagcaaggccatgataggtgtttaaaacagccagtgatgctttacgagaaattcccactgcatcagctaacgctaatgcggctaatgcattggtgtaattgtgttgaccagaaaggaacatctgtgaagtggcaagaagattttcaccatttacgttcaagtaacgattggtattatcaagctgataatccccttgtccgataccaaaactcacacaacgtgcatctttgccagctaaaggcaatgtcagaacatcatctgcgttatagacacaggttttagcattatcataaatacgtaatttagcttcacggtattgttctaatcctaacggatagcgattcatatgatcttcgctaatatttaataccgtagcagccgccgctgttaagctataggttgtctctaattgaaagctcgatagctctaagacatataagtcataaggctgtgttaataacgttaaagcaggtacaccaatattgccaccgacaccgacagggatcccgtcagctttagccatttcccccaccaacgtcgttacggtacttttgccattagagcctgttatcgcaacaataggtgcttttgcctcacggcaaaatagctcaatatcaccgacaatttccactccatgatctcgcgcttcaactaactcaggcgttgataacgcaatacccggacttgagacaattaaatcagcatcattaagccatacttgatgaaaactccccgtatgatactcaacatcagcaggtagcttatctaaacccgcgggatgctggcgagtatctatcactttaggtgttacaccttggcggataaaaaagtcaacgcaggatagaccagtaatgcctagtcccacgataacaacttttttcccctgataatttgccatgttaacgtacctttaatgtcgctaaaccaataaggactaacataagagagatgatccaaaagcggacaatcacacgaggctctggccaaccttttaattcatagtgatgatggattggcgccatacggaaaatacgttggccgcgcagtttaaatgaacctacttgtaaaataaccgagagcgtttcaacaacgaacacgccccccataatcactaataaaaattcttggcgtaataagacggcgatagtacctaatgcaccacctaatgctaaagagccaacatcacccataaagacttgggcaggataagtattaaaccaaaggaagcctaatcccgcaccgacaatggcggtacaaacaatcaccaattcgcctgcatgcattaaataaggaatttttaggtagctggcaaaattgacattacctgtagcccatgcaactaatgcaaatccagccgctacaaacaccgtaggcataatggctaagccatctaaaccatcggttaaatttaccgcgttactggtgccaacaatgacaaaataagccagtaagatatacaacatgccaagttgtggcatgacatctttaaagaaaggcacaacaagttgcgttgctggggtatctttaccaatcgcgtacatactaaatgcaaccgctaaagctaataccgattgccagaaatatttccaacgcgctattaagcctcgagtatctttacgcactactttgcgataatcatcgataaaaccgatgatgccataaccaatcagcaccaagagtacacaccatacataaggattatctaatcgcgcccacaataaggttgatacagcgatagaaaataggatcatgatcccacccatggtcggcgtaccacgtttgctaaagtgtgactcaggaccttcgttacgcaccacttgcccgatttgcattttttgtaaccatgcaattaaatggggtcccatccataacgcaataattaatgccgtcaataaaccaacaatcgctctgaatgtcagataagaaaacacattaaaaaatgtatgatatttaaccaaatattcggctagccaaactaacattcaaagcactcctttaatgcgttcacgatatcctccattgctgagcttcgtgaaccttttactaaaactgaaacaacatcatgctgctgtaataatggaattaattgggtaagcaaatcagctttaaatgaaaaatgctcaccgcctttattttcttgactaataaactggctgtaatgacccacggttaatacccgatcgataccgacttgatgggcaaaacgtcccacatcacggtgacatttttctgaatcttcgcctaattcagccatatctccagcgacaaagattttatatcctggtaattgagataaaacttgcagccctgctatcatcgacccatcattagcattataggtatcatctaacactatttttcctgttgttaattcaacaggatagagtctgccaggtacggctttcagtaccgctaaaccttgctgaatatccgttaatgtcgcccctaccgacaaggctaacgcacttgcggctaacgcattggcaatattatggcgaccaggtaaaggtagggtgattgctacccccccttctggcgtatgcaatgtaaaatcggtggtgagttgattaacaacgatattcgttgggtagaaatcggcttgagagtctgcagataaagagaaagaccactgagtttgacgtgagttaaaatgctgttgccataacgcaacatcattactttgctgattaataatggcagtgccttgctcttttaagccagtgaatatttcacctttagcttgagcaatcccttgtaaggaaccaaaaccttcaatatgtgcagaaaagagattattgaccaatgcactatctggtttaaccatattcacggtataggctatttcaccaatatggttagcaccaagttcaatcacggcaaaacgatgttcaggggttaaacgaaagagtgtcaggggaacaccaatatcattatttaaattgccatgtgtatataaggtttcaccacagtgacgcagtatcgaagccgtcatctctttaacggacgttttacccgaagagcccgttaacgccacaattttagcattgctaagcgaacggatataagcggcaatatgccccattgctaaacgggtatcttttacgatgatttgtggacattcaacatcgattttccgattaactaaaaccgcaacggcacccttttgtttgacatcagcaataaagtcatgagcatcaaaacgatcacctgctaaagcaataaacagacatgcatcatcaattttacggctatcggtagaaattgatttgatcattaattgattggcttggctttgagtaatagtactcaacgtgccttgagtgactagtgcaatagtttcgagagaaagcgctatcatgcgatcacccccaataaccgtgcaacagttaatcggtcagaataatcaagacggcgagtgccaacgatttgataatcttcgtgcccttttcctgccactaagatcatatcagcgggagaggcttgcattactacattagtcacggcttctgctcgaccttcaatcgctaatgcacgaccaggatccattaacccagaaaggatatcttgaataatggcttgaggctcttcactacgtggattgtcatcggtgataaccactttatcggcaaactgctctgctacagctcccattagtgggcgcttacctttatctctatcaccaccacaaccaaagatacaccacagtttgccagtacagtgtaagcgtgccgcttgtaacgctttttctaaggcatctggcgtgtgggcataatcaacgatcaccgtaggacgattatccgcactaaatacttccatacgaccacaaacgggcgttaatgcactggaagctttaatcactgcatcaagagggtattcaagtgccaaaagtgtagctaaagcacagagtaagttactgacattaaaagcccccattaatgggctttcaatttcaccttctccccaacttgaattaaaatggatagtggcacccgcatcatggtaattgatttgtgtcgcttgcacatagcgtccttgccaatttgccggcaatttatccgccatagtcaccgccactgcatcgggtagatgcgtcaaccatttatgccctaccgcatcatcagcattaatgattttttcgccactatggtgggtcgaaaataacaaccatttagcctgttcgtaattggccatatcaccatgataatcaaggtgatcgcgacttaagttggtaaatacgctggcgacaaaaggtagcgcactaacgcgcccttgaactaaaccgtgtgacgaaacctccattgcggtaaaggtagcgccttgattaactaattgctgtaattctaattggatatcaaccgctgaaccggttgtattcattgccggaacaatatgatctaataacccattgcctaccgttcccataacggcactgacttcacctaaaccttgcgcccactgtgctaacaattgtgttgttgtcgtttttccgttagtaccagtgacaccaatcagctttaatttattcgctggctgatgataaaaaattcctgcaagttttgataattgacaatttaggttttcaatataaataacgggtataccatgactttcacgaatttcgccatgagtagcaataccttcagcttccgctaaaacagcgcaaacaccttgtgcaattgcctgaggaatatagcgtctaccatccgtttcatggcctttaattgccacaaacagatcaccactcgcggcttttcggctatcgagtgtcatgtctttaagcgttaaagacggtgcttgtatcccgagtgcccctaataggtcacttaaattaggatctgccacttgtatcctcttttttattaatcactatttcacttttatcgtctggcgttaatgcatcaggctctacattcatcgtacgtagaaccgcgcccataattgtgccaaacactggtgcagaaactgcacccccataatatttgcccgcttttggctcgttaatgatcactactaaggcaaagcgtggacggcttgccggtgcaacaccggctgcataagaaatgtaggcattaatatactttccatctgggccgacttttttcgcggtcccggtcttaatcgcaacacgataccctttgatcgcagcacgaacgccaccaccgcccggtaaggcgacactttccatcatatgaaccactgttctcatgactttttcaggaaaaacgcgagtacccggtacaggagggtcaactttagtaatagaaagcggtcgataaataccaaaactaccgatagttgcatagacacgcgctaactgtaatggcgttaccattagcccatatccgaatgagaaggtggccctttcaagatcggaccaccgttgtttttttattggaaatatgccactactttcaccaactagccccaagttagttggttttccgaggccaaaacgggaataaacatctaccagttcagacgccggcatcgctaacgcaaggcgagatacccctacgttactcgatttctgtaaaattccagttatcgaaagctcacgataaagcgcaacatcttttatctgatgaccactaattcgataaggaacagtattaataacggtattttctttaataatattattgtttagcgcactcataaccaccatcggctttaccgtagagcctggctcaaaaatatcggtgatagctcgattacgcatcgcatctttcggcgttcccgctaaattattcgggttataggatgggctatttgccatcgctaacacttcgcctgtattgacatcaaccaaaaccgccgtacctgattcggctttattttcaatgactgcattggttaactctctatacacaacagattgtaaacgctcatcaatgcttaacattaagttgtgagcagcttggctatctgtttgagcgatattttcaatcacacggttaaagccatctttgcgtacaactcgctctccgggggcaccggtaagccattggttaaagcttttttcaaccccttcaataccatcaccatcaatgtttgtaacaccaatgatgtgagcggtcacttctcctgaaggataatagcgtttggactcttggcgcatgtttatccctttgattttcagcttacttatgtaatcactaatttcaggattaacttggcgcgcaagatagataaaacgagcggaaggtgttgcagaaattttttgagaaatttgattaacgggaagttttaatgcatcagcaagtgctaaccagcgtgaatcggtcatatcagggttagcttctaacacaactttaggatcagcccaaatagcatatacagggacactcaccgccaatggtcttcccatacgatcgcttatcatgccacgagctgtggggactttttgcacacgtaaagagcgcagatccccttcgcggatcaggggatctgggttaataatctgtaaataggcaactcgtattaataacgccgctaaagcaataccaataccaccgcaaagcaacgcaaaacgccaactcacaaatcctgttttttcttcaggtttacggagtttggcatttgactttgtctttgtcttcgcttttgccgaacgtgaaaatttcatacttgccttaattatttagtaaccacaatattctctttagttggatcaacatgaaccatgcctaactgttcacttgcaaaacgttcaactcggctatggtccgccaatgcattttcctcaaggatcaagttgcgccattcaatatccaatacatttttttctaacactaagcgctctttttctgctgtcagtaagcgtgttttatgtgctgtcgttaccacatagatcgcggagataataacggcgaaaaaaagaataagtggcaatttgccgtgacgcagtaaatcttgtcctatcactcccggtaatgaatggcgttcagtagacatttattcctcaatacgctgtgcgacacgtaaaacagaacttcgcgctcgtggattctcctcaacttcaacaccggtaggtttcattttatgaatactactcaggcgagcacttcctagtgctttaatttgttcttctgttaatgggatccccgctggaacaacaggccctttactttcatctcttataaagcgtttaactaatcggtcttctaaagagtggaaactaatcaccgataaacgtcctgctggcgctaaaatagacacggcgccttttaatgctttttcaatctcatctaactcactattgatatagatacggatcgcttgaaagctacgtgttgcagggtgcttatgtcgctcttttactggacttgcttcactaatcaaatccgctaactgtttagtacgtgttaatggctcttcagttttattacgcgccacaatggcacgggcaatgcgtttcgcgaaacgctcttcaccgaaggtttttagcacccaagtaatatcatcttcttcggcattcattaaccactgtgcagctgattgtcctgtggttgggtccatacgcatatcgagtggcccatcacgcataaaagagaatcctcgttcaggatcatctaattgcggtgaagaaacgcctaaatctaataatacgccatcaactttgccacttaaacctaactcattgatatagtgttcaatatttgaaaaaggcccatgaataatagagaatcgtggatcatcaatttcatttgccactgcgatagcttgtggatctctatcaatcgcaatgagacggccttgttcacctaattgcgataaaatcagacgagagtgcccgccacggccaaaagtaccgtcaatataaatacctgaaggtttaatattcaggccgtttactgcttcatccagtaatacactggtatggctaaaattattcgttgtcattatttaaagtgataaatccaatagtcgtgtcgataacggttcctgtgaggtttgctctgccaaaatgtcttctttgatctgttgataccagacctgttcatcccacaattcaaatttattgaattgaccgactaacatgacctctttggttagccccgcgtgctgtcttagcgtgctagctaacaaaagacgtcctgcgctatccatctggcattcactggcatgcccaagtaataaacgctgcactcttcgttcggcgggattcatggaagaaagcgctgccagttttaactcaattttttcccattcaggaagggtatacagcaataaacatggctgattgagatcaatggtacagaccatttgaccttcagaagcctcgttcagcgttgttcgataacgggaaggaactgttattcgccctttgctgtcgagattaacgagtgttgcaccacgaaacatcctcatttccctcagcgttataatttacaccacattatcccacaaatccccacaaatagagtttacggatggtatgaaaacgttgtcaagccagttgtaggacgctttattgatatttacagtaattttataatctcatcgaaatgaacaaattatcagcaggctaaaaaagcagaatattaacactatgattcctatcggttattttttatttttcttatttgttctcaaatagtgattatttatagagatgaaaaagggaaaaataagataaagaagtcataaaaagaaaatgacctatttaatgagataatgcctatttattgtcgttcatttacctttaaccaacataacaatacaaagccctctttaaattaaaaaaccggcttaatctactgaaaaaataatgtgatatcatgtagataattttttactgtcgagttttctttctgcaaagttaataaataaattattttatttaagtaatatcacttatagaaatatcaaaatttcacccgcgaattaaacaaaacaggataaattgtaaaaaaacgtttaagattaatctcaaattttattttatttaagtcacccgacattatttaaccaaataaactatccctgctttaatttaataaagcagggatagtcattataaaaaatgctgagtcagaaagtgaacgctaattaacgagtacgtcctaaactacctcggcgacataaatcacgtcgaatacgtgtaatacccgcttgtggtttttgctcttcttcaagacttgccaaaaccagctctaatacacgttgtgcaatatcacgatgtcgctgagccaccgataatactggacattcgaggaaatctaataattcatgatcaccaaatgtagcaatcactaactgcgtaggtaagcgtccacttctttgcaacgttacatccatcacaccttgtaatagcgcaaaggaggtcgtaaagagtgcatcaggcatcgggttattatttaaccattccgaaaatacctctgccgccgcttctcgttcataactattcgcataaagataagtcacttgtcgtggatcatcttgccacacactacgaaagccctgttcacgtaaaaaactgactgatagttcgggcaatgcgcctagatagagaaccgattgagaaggaaaagctttaagctcactcgctaacatttttgcgtcttctaaatcatcaccgacgacgctaataaaatgttcactctctaacgccctatctaaggcaatgataggcaacgaacgattagcccaacgctgataaaatgggtgctctgggggtaatgccgttgatacaataatggcatcaacttggcgttgtagtagatgttctacacaacgaatttcgttgtcaggttgatcttctgagcaggcaatcagcaattgataaccacgttgacgcgcttgtcgttcaagataattggcaattctggtataactggtattttccaaatcaggaataaccaaacctatagaacgcgtacgaccagcacgtaatcccgcggcaacagcgttcgggtggtaattgtgctctctgaccaccgccatcactttttcaacagtcttgtcacttacacggtactgtttagctttaccattaatgacataactcgctgttgttcgtgaaacaccagccaagcgggcgatttcatccagtttcactttagcctcttctaattattaatagggtatttattacattattgctatggttttcagtcatcatgctgatctgaatctgcattttaacacaatttactgataaaaccgtatgcgtcaacgtttccgtttataccttttaccaattacttgcattgttactgcctatgacttacctaaagtgcaataaaaaagcacctttacggtgcttttttgtctggtgatcacgactcttgatacatctgctcaatttcatttcgatagcgttcagaaattattttacgtcttaattttaaggtaggtgtcaattctccagactccatcgtaaacccttccgctaatagggtaaatcgtttaacttgatggaaactagcaaaattacgttgcatttcacgcaagcgttcatcaaataattctttgatcttagtatggcgtaataactctatccgatcgtgatattttaaatttaatgctcgagcatgttcttctaatgcatcaaaacaaggtacgatcagtgcagaaacaaatttacgggtatctgcaatcacagcgatatgctcaataaagcgatcttgccctaatgtaccttcaatcatttgcggtgcaatatattttccatttgaggttttcataagatctttcaaacgttcggtaatatataacatcccttcttcatctaatgcacccgcatcaccggtacgtaaccaaccatcttcagtaaacgcagcaactgtctcttcaggcttattaaaataacctttcatcacgatactaccgcgcacttggatctcgttttcttcgcctatacgtacctcaacccccggtaacggagtaccaatagagcctagtttataatggttctcttcccaacaagataccgtggcacaagtctctgtcatgccataaccatatttaatattaataccagcagctaagaaaaagccgatcaccgcatcatctaaacgagcgcctgcggcaggtaaaaaacgaactcgcccacctaaaatttgacgtagtggttgaagaacttttttatccgcaaagcgataacaccattgagatagcacgcctaatgaacgtccagctaagtgtgcctgacgttgtttttcaccctgtttaagagcccatttaaacatccattggcgtagtcgaggtgcttgagaaactttctcttgaatggcgctatatactttttcgtaaaagcgtggcactgcacacataaccgttggttttactgcagccattgcttcccttacggcatgggtatctgtgagataaacattaatagccccagtatgcataacatagaagctccatgcccgttcaaatacatgtgataacggtaaaaagcataatgaaacatctttatccgataatgaaaggcgctgatcatgcagataaagttgagaagccagattggtgtaatcaagcataacacctttaggctcacctgttgtacccgaggtataaatcagtgtaaacaaatcatctaaacaacattcatcaatacgttgttgtagcagagaatcatattgagattgacagtcactgattaagtttgtcagatgataagaaggtattgtcggatttaaaacgacctgagaattaaacacaataatatgtttaagttgcgggcataatagcgctaactcagaaacaacgtcatattccttttggtcaccaacaaaaagaatacgaatattcgcatcgttgatgatataagcggcttgttccacactacttgttgcataaagaggaactgtgacagcacgcaactgcaaagtagcaatatcggcaatagaccaatcaatgctgttttgggaaaaaatccccacattttcttgaacagccacgcccatatcgagtaatgcatttgagagtgcacgtgttttctttgctactgacgcccatgacatggcgatttcagacttagcatcccactgacgataagccgttttttccccagaagatgaaaattgcatctgcaatcttctaattatatgataatcatatagattattattatttatcatgattttcctgttatttatggaaaagcgtaggaataattaagttgaaataaagaataatgtcatcttctaatttcagcttacacctgttcgctgacttatctgaaagtctaagtgatccgcaaaaataaaggaatctaattttacataaatttgtaaaattgtgagtcatgaaaagttttgtcaatttcatcatactaatgaaaatgtaaaaatgagcctgaacactttgtgaacaaacaaagtattaacaagaaaaatataataaaatcaaaagataattataaaaatttattcatttacaagattaataacagagaaaataaagaaaaaaatcgattagatgacaatagttgcaactgatagggataggataacaattagggcaaaaatagtgacagctacccaagagacttatctttactatttactattaaagaatatcttttattggttattagcagtaagctaacgttatctgccactatttctgcataattagcatagagtgctaattatgagtgaatcactcttagttttgacaaacctcactaagtaaatttttcatccataaatggcctttatctcgcgccgttgactcatgccaaattaaatagcatggacgttctaccttctcccaaggtaatgatatcgccttaatgttcaattgttctgaatagctttcaactaaccatctaggcgcaatagcgaccgaataagtttttgagactagatttaatacactatttaaatcagtaccttcataagtaattaaatcttctaactctgtattcttataataagccgcactaaaagaccccacatcttctaaagaaacaatagaatgatgctcatttaataacatctcttcagtaacgctttctttaattcgtgggtgttggttagagacagccaaaaccacttcatcattgaataaagggtgtgaatgaaactctggtttatcaaattgtttataattaataaagaactcaacttcctgatattttaattggtgttcaatattactattcaaataagacttaatatttacattaatattaggggttttattttttattctctctacaatttttggcgctaacttgatatctaatggactgcaaatagataagctaaacacacgatcactttgttccggttcaaatcccgcccctggcaattcattatggactaattgtaatgcttgtcgaacagggccaaataattgtttggctcttaatgttggttgaatacctcggccataccgaacaaataactcgtcattaaacatgatcttaagacgagaaactgcattactgactgccggttgagacatacctaacacctgtgctgctcgtgtgacattttgcatttgcataacagcatcaaacaccgttaataaattaagatcaacattacgtaaatgcatatctgctgactctttattggtcgttgttgctgatgtgtaatccgtcattttttactccactatgttattataattggcgaattaaaacttattaataatataaaagcatattaataaattatatatctaaccatgactgtaacttttataaaaatattactacttattattcatcatccatgtacatcacaaaatgtataacacaaacaccaaaaaataattcatctttatattaaagagaataaattgacatttaaattacatattaatgaaatgattataccgatatatattacaacctgttttaccttatgccttgcaaataataaaacaaaatatgataaaaatcataataaaataataaaatctatcaccttacaggacactttcagaactattacagtcaccacggtaataatttttattcttatattcaaaatgttgctcaaatttattgatattgttgttaactacaaccgctcatccccctgatagttagttgttcaaaaaaaaagcaaacaattgtttaattttttatttcactccccgagagcgattatgtgaaacattaacctaatcaatgattgtttgatagatataatcattactaaaaatttagatattagtcagaattactaagaataaaatataattcacacatcaaaacaaattaaaaaattccaatgcttgacatgatgattggtatccggtatcaataaataaacattattaagaacaaatgtaaggatgtttcatgttaaacgcaattttactatcaagcctactactattcgcaacattgatgcgcggtcggctgatgggtaaaaaatgaaacatacctacccttagagaaaaacccgcgctaatcgcgggtttttttatacctgggagagcgcaaaaaacgaaataaaaaagtataaggaacagattatgagcaacaatgtgattatttttgacaccacattaagagatggcgaacaagcattgcaagctagcttaagcgtaaaagagaagttacaaattgcttatgccttagaacgtttaggtgtagatatcattgaagcgggttttcctgtctcttcccctggggattttgaatctgtacaaaccatcgctcgagaaattaaaaatagtcgcatttgtgcgttagctcgctgtgttgataatgatattgacgttgccgcagagtcattaaacattgccgaggcatttcgtattcatgtttttttagctacctccgctttgcatgctgaacataagttaaaaaaatcctttgatgacattattgaaatgggaacacgctcaattaaacgcgcccgacgctatactgatgatgttgagttttcttgcgaagatgcggggcgtacccatattgataatttatgtcgcattgtggaaagtgccatcaacgcgggcgcaacaaccattaatattccagacaccgtaggttataccacgccttatcaattcggtggcattatcactaatttatttgaacgtgtacctaatattgataaagcggtgatctccgttcattgccatgatgatttaggtatggctgttgcaaactctattaccgcagtacaagcaggtgcaagacaagttgaagggactatcaacggcttaggtgaacgagccggtaactgcgctttagaagaagtgattatggcgataaaagtacgtgaacaaatgatgaatgtacaaacgcgtattaatcacaaagagatctaccgtaccagccagttagtcagtcaattatgtaatacccctattcatgccaataaatccatcgttggctcaaatgcctttgcccactcctctggtattcaccaagatggcgtactgaaaaatcgtgaaacttacgaaattatgacacctgaatcaattggtttaaaagaggtgcaattgaacttaacgtctcgctctggtcgagctgcggtaaaacaccgtatggaagagatgggctatcgcgaaacagattataacttagattctttatatgctgctttcttacgtttagctgataaaaaaggtcaagtttttgactatgacttagaagcattggcttttatggggcaacaacaacaagagcctgatgagtttgtaatgaactattttaatactcaatccggctcctcaacagttgccacggccagtgtcagcattagtcgtaaaaatgaagaaatcactgaagcagcaacaggaaatggtcccgttgatgctgtctatcaagctatttctcgtgctacaggttatcccttaaaactggtgacttatcaattaacagccaaaggtgaaggacgagatgcattaggacaagttgatatcgtagttgaataccaaggacgtaaatttcatggcatgggattagaaactgatatcgtcggttcatccgccaacgccatgatgcatgttatcaacagtatttggcgttcagagcaagtcgaaatagaaaaacgcaaacaccatacaacacaagaagcggtttaatcattatgtctaaacattatcatattgcagtattgcccggagatggcattggccctgaagttatggcgcaagcacaaaaagtgatcgatgcggtaaataaacgattttcactgaatatcacgaccaaagagtacgatattggtggtattgctatcgataatcatggcacaccattaccggcaaccaccttagctggatgtgagcaagctgatgcgattttattcggctctgtgggggggcctaaatgggagcatttaccggcagatcaacaaccggaacgtggcgcattattacctttacgtaaacactttaaattattctgcaatctgcgcccagctcgtttatataaaggtttagaagcttattgtccattgcgtgctgatattgcacaacgcggttttgatattttatgtgttcgtgaattaactggggggatctatttcggtcaacctaaaggccgtgatggtgaaggtcgcgaagagcgtgcttttgataccgaggtttaccatcgctatgaaatcgaacgtattgctcattttgctttcaaatcagcgcaaaaacgtcgttataaagtcacgtcgattgataaagccaacgttttacaaagctctattttatggcgtgaagtcgtcactgaggtcgctaagcaataccctgatgtgaccttgcaacatatgtatatcgataatgcgacaatgcaattaattaaagatccagcgcaatttgatgtattgctgtgctccaatatctttggcgatattttatcagacgaatgcgccatgatcaccggttcaatgggcatgttgccctctgcaagcgtaaatgaagcacattttggtttatatgaacccgcaggtggctccgcaccagatattgccggtaaaaatatcgccaatccaatagcacaaattttatcaaccgccctattactgcgttatagctttaatgaagataaagcagcccaagccattgaagaagcaattacaagagtactagcaacaggctatcgcaccgcagatttagcgggagaaggaaacgcaataacaaccgcagaaatgggtgatcatatcgctcagtttattcaagaaggggcataacatgggtaaaacattatatcaaaaaatttacgatgcacatgttgtcagagaagtagcgaatgaaacacctattatatatatcgatagacatttagtgcatgaagtgacttcacctcaagcttttgatggtttaagaaccaaaggtcgtgctgttcgtcaacccaacaaaacctttgccacaatggatcacaacgtttcaactcaaaccaaagatatcaacgcctgtggtgatatggcgcgtattcaaatgcaagagttaatgaaaaactgtcaagaatttggtgtgaccttgtatgacttaaatcacccatatcaaggaattgttcatgttatggggcctgaacaaggcttaactttaccaggcatgacaattgtttgtggcgactcacatacagcaacacatggtgcctttggcgcattagctttcggtattggcacttctgaggttgagcacgtattagcgacacaaaccttaaaacaatcacgtgctaaaaccttaaaaatcgaagtacaaggcaaaacagccaatggcatcacggcaaaagatatcgtattggcgattatcggaaaattgggtagtgcgggaggtacggggtatatcattgaatttacgggagaagctattgaagctttgagtatggaagggcgaatgacgttatgcaatatggcgatagagatgggggcaaaagcaggcttagttgctcctgatgagactacatttgcttacttaaaaggacgtcaatttgcccctcaagccccattgtgggatgaagctgtcgcctattggaaaacgttaaagtcggacgaagatgctatttttgatgctactgtaacgattaatgccgcagagattgcaccacaagtgacttgggggacgaatccgggacaagtgattgctattgaccaaattgttccgcgattgaacagttttaacgatcctgttgaacgagctagcgccgaaaaagccttagcttatatgggattaactgaaggtgttaacttaactgatattacaatagataaagtttttataggctcttgcactaactctcgtattgaagatttacgcgcagccgcaaagatagctaaagggcataaagtcgcctcccatgtacaggcaattgttgttcccggctcaggccctgttaaagcccaagcagaagcagaaggtttagataaaatttttattgaagccggttttgagtggcgtttacccggctgctcaatgtgcttggcaatgaacaatgaccgattaaatcccggagagcgttgcgcatcgaccagcaatcgtaattttgaaggtcgccaaggtcgtggtggcagaactcatttagtcagtccggcaatggccgctgccgccgccattcatggacattttgctgatattcgcacttttgcaacagtatcataacggagagcctaatgaataaattcacacaacacactggaattccagtacctttagatgctgccaacgtggatactgatgcgattattcccaaacaatttttacaaaaagtcactcgcacaggatttggtaaacacttatttcatgattggcgatttttagatgatgaaggcacccagcctaacccatcatttattttaaatcagcccatctatcaagatgcttctattttattggcgcgcgagaattttggttgtggatcttctcgcgaacatgcgccttgggcgctcacagattatggctttcatgcggtgatcgcgccgagttttgctgatattttttacggcaattcctttaataaccagttattgccaatcaaattaagtgatgagcaagttacccagttatttaattgggtaacagagcatgctggtacgcctattaccgttgatttagttgcccaacaagtgatcgctggtgaattatgcttctcatttgaaatcgatgcatttcgccgtcattgcatgattgagggattagacagtatcggattaacgttacaacaccaagcagagataagtgcttatgaagctaaacaaccagcttttatgcgttaatcactgactcaattaccttatttcactgtttgttatctgtaaaaatttaaactttgtcattctcgccgctatttacctcgcggcattttttttcagtaaaacgaacaaaaaagccagtgaactattatcactggccggtaatcaccgcatgctcaaagggggagtctgttagtattcataatttgtgataactaacataagagctaactttaaacacaaacattatcggtctaatataaggaaattaaaattgatcactttaataagggatttcctcttttatgacatcaccccgcttagagttgcaatttattcgcttatggcaagcttttgagggaaaagagactgaaaccacattacaagagcttgctgaaacattacattgcactcgtcgccatgtgcgttcgttactaaacaaaatgcatcaaactggttggatagattggcaagcagaagtaggaagaggaaaaaaatccaccctgacttttcattctaacgcctttgacatccaacaaagccgagcagagcgattactggaagaaaatgatatagaaaagctcgttgcactgatgggcgataaagactcgttacggcaaatggtgctttcacagattgaaaaaagctttcaccctagccaacaacgtctacgaataatttactatcgcccttttcgtaatttattacccggtacgccgcttcggcgctctgaattacatttaatgagccaaatatttaattcattacttcacttaaaagaggaaaatggggaagtcgaagcggaattagcccatcactggcagatgatcagcgagcaacattggcgcttttatttacgccctgctatctattttcaccatggacgagaattaaccatagaggatatcagcacctctttaatgagaatgaaagtctgcaatccactttatgcacatattgagaaaataacctcaccgcaaccttatgttattgatatttatttaaccgtaccggataaacaatttgccaccctattaggtagcccacaagcagcgatcttaccccaagaatggcgaactctcgctaatttttctcagcaccccattggcacaggggcataccaagtgatgagcaatgatcaacataaactgcaaatcaaagcgtttgatcgctattttggtttacgcgcactattagataacatcgatatttgggtggttcctgaattaaaagacaaaatggtttgctctacccttcatttaaccgatgatgatactcataacaactcactggaaagccgcaaagaggaaggctgttattttttactttacgatagccgctcaacacaatgccaacaacctgagatccgcgaatggcttagtagtgtattaacaccggtgaatatgttggcccattgtgcgccctcttatcaacgccattggtcacctgcttatggtttattgttacactggcaccatagcaaactgatcccaccgcatactaaacccgcttcactcacaaaactgaccattacactgtataaagagcaccacgaatacagcactattgctgaactgatcaaaaaaatcttatctgactatgatatcgaattatctattcaagtgcttgattatgaacagtggtattatggtgatgcaaagagtgatatctggttagctaccgtcaatttctataaaccgctcgagttttctatttttgcagcactttatgaactgcccctatttcaccagtgcatgggtgaacgttatgaagatgccctagccttatggcgtcaaaaagtattaccgcttgaagagtggtgtcgccaattaacacaaaataattggcttttcccgttatttcaccatttacttgaattacaagggcaacgtacgatacgcggtgtaaaaatgaatacctttggttggtttgattttaaatcggcatggtttatacctgatttagaaacgcccccattaaaatagcgttttcacttataactatgttaattcacagaaacccgcaaagttataaacaccaacagtaaggtctaggggatttattcactttttctgtggatatctatgtgaaaaagagtgagataatcagggtatagtttttatattagcctacagactgttgaaacattttttaaaatatcacttataattcaaattagtagataagtttttatccctatttcaacgattggataaaccaatgaataaagtccaatggttaaattgtacaaaaaacaatcatagtcggttttatccacaggttgtgccgattagttaatcgaaataggcagattttggggaatatcggcaaaagtcaaggctgtaaatcagaacagtgatctcacttttgcggagttatcccacaaagctgtggataacctagtgcaaaagcctgtttatgatctaaggataaccctgaacaacttatatcatttattattaaaacctcgattcacataaaaaaatgatgatatatcatgctattatgttttaacttaaatcagtgaaaaaacattttccatcatcctttttttctgtttatttattgtacaggaagacagttatttatgtttacgccaccagcagcacctgaaaatgaatccgttttactcgcacgagcacaagcgctggctggttataccttcggtgaactcgccgcttttgcacagcttcctattcctgaaaatttaaagcgtgataaaggttgggtcggtatgctattggaatactatttaggtgccagtgccggcagtaaacctgaacaagatttttctcatatcggtgttgagctaaaaaccatccctatcgaccgttttggtatgccattagaaacgacctttgtttgtgtagccgcacttacaggaaacagtgggatcacatgggagaatagccatgtaaaacgtaagctgtcgaaagtattatgggtacctgtagagggagaacgggagatcccattagcacagcgtagagtcgcttccccgctactttggagccccaatcatcttgaagaagagctactgcgtcacgattgggaagagttaatggatatgattgtcttaggaaaagtagaaagcattactgcgcgtcacggacaagtattacaaattcgccctaaggctgctaacagtaaggcattaaccgaagccattggtgaaaatggacaacgcatcatgacacttccccgtggtttttatttaaaaaagaactttacagcgccactgattgctcgttatttccaactttaatgcgttacagtaaacaaaatgccccgagttatcttagtgaataactcggggcacatcgtattttttgctggtaaattattaaacacagtgagttgatgctaatcgaacgcctactgctctggtgatttctgtcaatgttgtcagtgttggattaccattttcagataatgctcgataaatatgttgtcgagataatcctgattttttcgcaatcacgcccactccaccatgagcctcaataatttgccgtaatgcaattaaaaatgcacctattcccccaggctcataaataccttctaacgccgtttgcaaatacacctcagcataatcaggatcttctcgtagttcatttatcatctctaaatcatggtcaagatatgcaggaacagtttttctttttactacatctattttattggtcatttttcatccttacatgataatcttcaagatagttcactgctttatcaatatctgcttgttgagtacttttattccctccaacaagtaaaagaataataaattcattttctattgaataataaacccgatatccctgcccgaagtttattcgtaaagcccagactccatcacgaacaaatttatgatcggcgaagttaccataacatgctcgagttacttgtacttcaattttagcagccgcttgaggatctcgtttcctaagcttttgtatccactctcgatagggtactttttggtttctgtcctgataacgcactattttatatggcatttgctttccttattgccaaagtcctaattgttgcttataaatcacactaaaaatgtaacttataacagacaaaaatcaaagaggaaatatttttcgtacacatatcataaaaaaatgccccgagttatcttagtgaataactcggggcacaaataacaattatgattaagtaatcaataattaacgatagacaataccgccatcggttaagatagcttggcccgtaatatagtcggaatcatcacttgccaagaaggaaactaacgcagctacgtcatcaggagtttgagcacgtcctagagcaataccgtccacatattttttataggtctcaccttttggtgctccagtaatttcagcgaaacgctcgtcaatctcaacccacatatcggtgccgacaatgcccgggcaataagcattaacagtgatgcctgcgctcgcatactctttagctgccgcttgtgttaatgcacgtactgcaaatttagtggcagaataaacccctaacatggcaaaaccatcgtgcccagcaatagaagatgcattaataatcttccctttatggcctaatgctttaaatttctcagaagcggcctgaataccccacatcacaccattaacgttaattttgaagatccgatccatatcttccggagtcacatctgcaagaggtttcacctgtgcaatacctgcgttattgatcataacatcaaaaccgcctaaggttttttcagcatgttcaactgccgcaaagacttcatcacggttgctaatatctgcagcaaaggtcgttactttacgccctaacgcttcaatttcttttgctacatcggataatttatctgcttttaagtcaaccagagcaatatcggcaccctctttagcaagacgtaatgcgataccacgaccaattccctgagcagcacctgtaactaaaattactttaccattcaaagccattgtctttctcctgaatatttacagatgaaaaagctcttccaaaaaagaactttattaataatttaacagtagcaattaaagtgcgatgtgacaaagaaatgatcattcactagtaaacacaataagtagaatagaatatagtgaaaataattatcatttagaataacaagttaccaaaaggccatcatctgttgcaaaagagcagatgatcttttttactcattaactttatagttagcaaaaaatgcttaactcattcatttaatggataaaaataaggcaatatctaaatagatattgccttgacattatttatgacaaaaaagtaattattttttagccgcttgcagatatagcatatcaagtgcaatggttgctccggcaagggcagtaatatctgattgatcatacgctggcgatacttcaactaaatccatgcctacaatatttaacggctgtagagcacgcagcattttcagcgccttatccgtggttaatccacccacaaccggtgttcctgtacccggtgcaaatgcgggatcaaggcaatcaatatcaaaagtcaaataaacaggaagtgaacccacaatctctttaatttgcgcgactaaatcatcaaccccacgatcattaacttgtgcagcatccaagacagtaaagccgttattagtgtcatgctcggtacgaataccaatttgcactgaatgctgtggatcaatcaaaccttcattaggagcatgatagaacatcgtaccgtgatcaaacttactgccattagcataagtatcggtatgagcatcaaaatgcaccaaagccattttgccaaagtgtttagcgtgagcacgtaatagaggtaatgtcacaaagtgatcaccaccaaaggttaaacatcttttacctgctgctagcaatttttccgtatgagcttgtagcttatcactcatatcttgcgcatcaccgaagttaaatactaaatcaccacaatcaacaactttgaggcgttcacgcatatcgaagtgccaaggccagcgatgtccttcccacgctaagttagtcgaaatctggcgaatagcgccgggcccatggcgagtacctgcacgacctgaagttgccatatcaaaaggcaccccagtgatcacccaatcagcatcactgctataaggttgaaaattcagtggaaaacgtaaaaaaccaaatgcatttgagatcaaagaattatcagtctcattacctaacgtacaatttttcatgccattacctctgttacttattttaacaagcaacatataaatcaatatgatagataaagagtgatgtatcaacaccactctgcattaggaagtaagcattactcctcttcttccagataggtataaccgtataagccactttcaaattcagttaggaactgctcttggagtgctttatctaactgtgcatttttcacttgagtacggaagcgctccaacaataccgcaggattaagttttacatattgaagcatatccgcaacggtatcaccctcttcactcaactgataagtaagattgcctttctcatcaagataaacatcaacagcagctgtatcaccaaataagttatgcatatttccaaggatttcctgatacgcccccaccataaagaagccaatcattggtggatattcaggatcataagctggcattggcatcgtggtttcgaccccatcaccatcgacataatgatcgataataccatctgaatcacaagtgatatctagcaatacagcacggcgatcgagcggtttatctaaaccttcaattggtaatacagggaataattgatcaattccccaagcatcaggcaatgactggaacagtgaaaagttgacatagaacttatctgacatacgctcttgcagttcatcaataatcgggcgatgggctcgattacttggatctaaatcatattgaatatgacgacagatattcagatataactcttccgcccatgcacgctctgtcagacttaacataccgtgtacatattgagtatggacatcatgtaaatctaattggctatcatgcagccattcacgcaatgaacggctattccctttggtttgcatctcttcccatgtttcccaaaggcttgcgataggtcttggagcatcttcggccggcggcgtgattgcagtaaattcgttacgttcaacaccaataacattggaaataagcaccgtatgatgcgcagttaatgctcgacctgattctgtaataacggttggatgaggtaattcattttcatcacaagcatcaccaatcgcccaaataacgttattagcgtattcattcaggccatagttaacggagcaatcagattgtgagcgcgtaccttcataatcaacgcccaagccaccaccaacatcaaaatactgaatattgacccctaacttatgtagctcaacataaaaacgggctgattcacgcacacctgtcgcaatatcacggatattagccatctgtgatccaaggtgaaaatgcaataactgcaaactatctaaacgaccagcttggcgtagcgtatcaatcagttgtagtacttgtgttgcagcaaggccgaattttgatttttcacccccactggcttgccatttaccggagccttgagaagcaaggcgagcacgaacccctaagcgggggatcacttctaaacgttcggcttcttcaagtaccatttttatctcagacattttttcaatgaccaagaacactttatgaccgagcttttcccctgtaagggctaaacgaatatattcgcgatctttgtaaccattacaaacaatcaccgaactggtcatgttggcatgagcaagcactgccattaattcagctttagagccagcttctaatcctaatggctctccagcattaattagcgattcaatcacacgacgctgttgattgactttaattggataaactaaaaagtaatcccctttgtagccataagactcacgtgcacgatgaaaagcggcattaattgagcgcaaacggtgctgtaaaatttgtggaaaacaaaacagcgcaggaaggcgtaaatgtgaatgctcttcttgtacttgcttaactaattctgttaaatccagcgttgcttcaggcacatcaggatttgggcaaacactaatattgccgcgattattcgcgcagtagtatcctcccccccaatatgtgatgttataagtctgttgcatcttacgagcgatgttatcattcatgacattctccttagggagtatgagtttataccttgcctgtcactatagtagtcaataatttcatggctagctgaaatgaccgataaataacagttagaagtaatgactcactatatatttttgtatgattatccagcctaacgcaggatatagtagtagaaagcgatgaagttaaccgactaatagttaacacaatcacctattggcaagtaacagacaacttcgctctaaagaaaaagagctcaaagaggaaatcactctagacatactacgggtatagtattggcgagtactgttttggtttttgaaaagaataaccagtagacaatggatcattacccattcactccacacatggcttaaccttataagccatttccctaacagagaaacaggatcagcaatcctgcggtttacactgtgattcagttttcacagtaacggcgaggttatacctgtagttgaatcaaaatgcaaaaacaaaatagataaatcgcttttttttattatttttctttttgctcacttgaaaaattgtgtcacacaaaaaatgatatcaactattggatgcgagtttatccctatatttgattaaaaaaagctggaattaaagagaaaacagtcctaaaatggacgtctagatgttaaaacatccatccttagaccatctgtattaaggtaacgagatataatgactacacacctttttacttctgaatcagtatcagaaggtcatccagacaaaattgcggatcaaatttctgatgccgtattggatgcaattttagaacaagatccaaaagcacgtgttgcctgtgaaacttacgttaaaacaggcatggtgatggtaggcggagaaattaccaccaaagcttgggttgatatcgaagagatcacacgtaaaacagtacgtgaaatcggttataccagttcagatatgggctttgatgctaattcctgcgccgttatcagtgcgattggtaaacaatccccagatatcaaccaaggtgttgaccgcgcagatccccttgaacaaggtgccggtgaccaaggcttaatgtttggttatgccactaatgaaactgacgttctgatgccagcgcctattacttatgctcaccgcttagtccagcgccaagctcaagtacgtaaaaatggcacactaccatggttacgtccagatgctaaaagccagatcactttccaatacgacaataacaacattgttggtattgatgccgtggttttatcaactcagcatgctgaagatatttcacaaaaagacttacatgaagcggtaatggaagagatcattaaacctattctgccaacagaatggttaaatgaacaaaccaaatatttcattaacccaacaggtcgttttgttatcggtggcccaatgggcgactgtggattaacaggtcgtaagatcattgttgatacttatggtggtatggcacgccacggcggtggggcattctctggtaaagatccttccaaagttgaccgttctgcggcttatgctgcacgttatgttgcaaaaaatattgttgctgcgggcttagcagatcgctgtgaaattcaagtgtcttacgctatcggtgttgcagagccaacatctattatggtcgaaacatttggcactgaaaaaatccctacttcacaactgatcttattagtacgtgaattctttgatttacgcccttatggcttaattcaaatgctggatttactgcatccgatctaccaaaaaacagcagcatacggtcattttggtcgtgctgaattcccttgggaagcaacagataaagctgagattttacgtgaagctgcgggtttaaaataaatttcccttgtttcatagcaaactcattaaaccacatcttttaggtgtggtttttttattcctgaaatttatctgtttgttaaccataaaaaaaccccgcaatattaacggggaactcaaagtcagtaagagaacagggagtgatgatgaaataaacaaatcaatcagggtagtctatccactctccttcatttaatttgatataagatttcccttgataatcaaccacaatggtattttgattttctgataccgtcgcggtttgtggtaattcacgggttaaagcattccaatcaatggtgggttgattaaagatatcgccattcacattacggagaataaaatcggataacgctaaataactgcttggtttatctatcatcataggcgtatgaggtaaacgttgatttttaagtccagtaaaacgaataccgacaggaactgtagtaatactttggcttggaatatctcgcaaaccagacatctgagttatatcaccttgtaatgcggctccatgttcaggaacaatcactaccatcacttttctgccacgtttatcaagggtattaataaaagcatttaagttatcaagtagtgctgaggctcttttgccataatcagccgttgtattttcgccaacgaacctattaccatcatgaagtgacactaaattgacaaaggtcaccgtccgtttttcatctgatttttctcgtgcttttaaccaacgctctaaggtctctttatcgttatagattttagagccatcaaaagcggtaatttgatgagagagtccgctttgatcttgcaacggcacattaagattacctaactctctaatttcttgaagataatgaccaaactcgccattatgatcgagcaccaatttcttctcaaaacctaaagcagccagattatccatcaataagcattgcatatcgacaggatcatacaaatcagcgtgttgtgtttgcccacaactggctcttaataaacgtaatgaagcggggccactataagaagcaacactattaaagcgattaaataacacatcaaagttaccccaaataggatgttgctgtaatccgacggctgccgcatcagcggtagagagtgaacaaatattaataattaaaatatcaaagggttgtgcataagaagagagctgagcgggagcgggtgtgctgcgtttattttcgtaacgataaaactgagcaagccattcatctaacactttgttattagccggctgtttttgtggcgggtaaggtgaactcagtacgttattatttggcgctctagtctgcgctgtcgataatatttctgtattttgcggttgtggctgatcgatagatgtgttggtttgctgagtaaagctattggcagaaacagcagaagccatagcgcctgaaaaatgggtaaaaccactaatattaagccacactacacccgcgataataaacaccgacactcttacccactgttcaataaagagataccctaccagtaaaataaatgccaccccgatcatctttaagttaataaaattaacagctaattcaatgaggtaagagaatgaaaaattttttaactgccctccttgttctaataccgttgaaaaactaggtagccaagtgtcgtggtagaaaagcataacccctatagggatcgctatccaattacgtaatttatgccaaaattttttcggtaatggaaataataaaaatgctagaaagagtaaattgctaaatgcatcaaattttaaataaccataccaaagcaaaacaaactttagcaaaaaataaaaattccaggcgcccaacccatgccagtaatgtaaaaaactgaaccgagttgttttagtcttgttcattttaattacctacttattcgtatctatataatatccgacattgatatgaatattcatatttgcctttttatacttcttatttttataaataactataaagttaactcttaatagaatattcccccatcaattagtaaaactacttacatgtaaaagaaaaagtacataaaataaattactgacaaataaatataagcaatcaacttaaaaataattaagttgattaataaacaaaacgccactttatatttatataatagacataaattttatagttgtgttgttattttaaaaaataaatagcaacacagagttatcttattttcttatatccaaaaccaaacaaaataatcacaaatagaacggttaaattaacaaatgcattacaaaacaaacactataagaacataaagctaaaaaacaaaataaaaacaataacaaacagatgatttaactaatttaatggtattttacttgataaaaatcaaatcttttttgatcatctaaaaaagactatcttagaatttgttataaataggtaatttacaattatcttatatttcgttttttttgactaataatggtttatttattatttaaatgaatttattgagaatattatcattgtcaaagagggttattatttattcccaatagaatttaaattcgtatatttaatttatgtatttatacgtaattgaaataactatttttaaggcatatccttaaataaagaatattaatattttatttaacacttaccccttctttgactaagaaaaataaaattacaggttaagaatttatttttacatgagggttaaaaaatggaaaataaaaaaattattcgctcggagataaaaagagaaaaagagagtacaaaccaagatataaataaattaaagaaattattttcaataaacaactatcactatagagatattaataacgaagaaaatcaacatagccttatttatcgttggccattactcaacacatttaattcaataactaaatgagaaaaactatgccactaattgtattaaaagggctcagaggtggagtaggaaccacctcaataaccgttgcactggctcgccaatttcatcaccataaatacaatgtcattgttatcgataactgtgtgaataatatcttacatttctattttccagaaaaatcacaagtcaccacattaggacaagcactactcgcgcataccccaatagaacaagcgatttgtgattatcaaaacggttatcaaattttaccttttggagtcgttaattcagaagataaattgcacttgcaagcatctgccactgccaaccaacatctactgcatttttttaccgcttttactcaacaatacccagacactttaatttttctcgatttacaaccagagcacgataccctttttaaatcatgggttgcgaaagccaatatcgtattaaccgttaccacacctgaaagtaactgtcatattcggcttaaccaacatacctttgctgccaatgagtatattctggtgaatcaattttgtgccactagccaaatccatcaagatttttatcaattttggcaaaccagtcagtttcctttctgcccaataaaacttcatcgcgatgaagcattattagaagcctgtgcttcacgcttacctttatatgattaccgcgctaattgcatgttagttgaagaaattaatcaacttctacaatggtgcttgcctttattgttaagcaaaaaaggatagccacaatgtcaaccatcgattatccagagaaaaaagcgtcccgctcgataaggcaacaggctactgtgcagccgcatatcttaacccgttattacaaattttatcgtcataatggggcttcattcagtgcggctatcgtgaatgagcttttctgggtattaatgtggctctttttgcgtatggaatcccctttttggcagaaaatagcacaaaaacaacaacaactatttcctcatattaatccgcgtcgccctaaattatgcgatccgatccgatacttattacaaagtatttggcttatttgccattatttgatgctcaccttggtgaaaaaaccgattcaatttattgtctatattagacagtattatcaaaatctctttgctcgcttatctcctgttgcgcgagatatgatccatcataagaaaaaaaacacgccactatggcaatacgctctattatcgctcgttgctgtttttgccatttttattatcttattaagtattactcaaccttttgatttaaaactacaatttgtttttgttctcgtgatttggctgatagccttagctatccgcgatatccctggccgactgtcttctattaccattattattttatcgctgactattgcttgccgatatatttggtggcgctatcaatacacactctactgggtggataatctgagccttttctttgggatcttactattactggctgaaacttatgcatggattgtgttatttcttagttttatgcaatgtatttggccactccatcgacaacctatttcaatgcctcaagatacaacacaatggcctactgtcgatatttttattcccacatataacgaagcgctacaagttgtaaaaccaacactttatgcctgtttaaacattgattggcctaaagataaattaactatctatttattagatgatggctctcgccctgagtttgcggcttttgctaaagaaattggtattcaatatatcactcgtgaaaaacatgattttgctaaagccggcaatatcaaccatgcattgagcaaagcctgcggagaatatgtggctatttttgactgtgaccatattccgacacgctcattcttacaatttactatgggctggttcctaaaagacgaaaaaatggcattggtacaaacaccacaccattttttctctccagatccctttgaacgtaatttaggcaatttccgcgaaacaccgaatgaaggcacgcttttttatggattagtgcaagatggtaatgatacttggaatgcagcttttttctgtggctcctgtgctgtattacgtcgttgtgctttggatgaaattggcgggctggcagttgaaactgtgaccgaagacgcacatacctcattacgcttacatcgccatggttggacttccgcttatattcgtatccctcttgccgcaggattagcaacaggatcactttcagcacatattggccaacgcatacgttgggcaaaaggaatgatacaaatatttcgtttagataatccactctttggcaaagggctgacactgccacagcgcttttgttacctcaatgccatgttgcactttttatcaggcataccaaggatgatcttcttattagcaccactaacgttccttatctttcatgcctatattatttacgcacccgccatcgctatcgctttgtatgtcgtgccttatttattacacatttggttagccgcgaccaaattacaaggtccttatcgccactcattttggggagaaatttatgaaacgattttagcttggtacaccactcgccccgtattaagcaccctattctcaccttataaaggtaaatttaatgtcacagagaaaggggcaattatgaagaaaagttttgtcgattggcaaattaatcgcccctatattctgtttcttaatcttaatttgttaggaattctatttgctttctggcgtatcgcaacaagcgatcccgatgaaaggttagccgtactcatgtgcttagtttgggtatgctataacttagtattactaggtgttgccattgctgtttctgtagaagcaaagcaagagcgacagttcccacgggtacgtctaagagtacccgcaatgctattactccaagacggttcgctttattcttgtcagctcaatgacttctctgataatggctgtgccattgtattaccagataattttacagttcccttatcttgtcaccaagagatcaccgttattctcaaacaaaatcaacgtgaatatgcttttgaagcacgtattttacggattgataatcgcattattggcttacaactgcttaatatggatacacaaaaatccattgattttaccgcctgtacttttgaacgagccgacacttgggctaattggcaacacgctctccctgccgataatccactgaatagtttaagaaatatcatttatatcagtatgcggggctataacaccttacttaaacgcgccccgtatcttgtttacctcttatttcgtttattagggcagtgtttattgtggctattatcgctacttccacgacgtgtcaatgtttcacaaatatttcattaatcttaacggtaaaactcagctttttgggaatttattaatgaacaataagatctatgggtaataataatgaaaaaatattttctactattcgccttacttatgctttccggtttagcttatagtgatgacgaaaaagaagtgccagcggttataacggaacaacctttcataacggttgaagaagagaaaatcactttaacatcaccggatcagataatcccatctcgccaagaaacacgactatttgcaacaacagcacctacttatggagctctaaaattacaaggcgctagccctgatggttatctagaatttggtgttcgtagtgatgaatatgtttcacaggcaatattagatctagagtttaccccctcgccttcattactgcctatagaatcacatcttaatatctatttaaatgatgagatcatgggcgtgatccccctgaaaaaagaagaactcggccataaaaaccacattacattaccgctcgatccacggtttattcaagattttaatcatttaaaatttacttttatcggccattaccgagaaatttgtgaaaaccaagccaataccaccttatggcttgatatcagcaaaaatagccaactgcatctcacctatcaatcattgaaattgagtaacgaattagccaatttccccgagcctttctttgatagtcgcgattttggtacttttaccttacctatggtgtttagccaatcccctaatcttacccaacaaaaagcggcgggaatactcgcttcttggtttggtacacaagtcgattggcgccagcaacactaccctgtgtattacaatcagttgcccaatcaacacagcattgtatttgccactaataaacaacaccccaactttcttaatacacatgccaatgtcaatgctcccaccattgaattagtctcacacccaacggatccttatgtaaaactgctgttagtaatgggtcgtgatgacaatgacttaattaccgccgtcaatggtattgcccggggacaagttatttttagaggggataccgtcaccattaatgatgtcaatctattggcaccacgtgaaccttatgatgcacctaagtgggtacaattaaataaaccaatctactttaataccttgcaagattatcaaggtcagttgcaatctcgtggactagagcctgctcccatcacactcaatatgaccttacctcctgatttatttatgtttaataatacaggactacagatgcaattgcgttatcgttataccgctccggcatttcaagatgattctcgtatgtcgatttcagtcaatgatcactttatcaaagcctaccctttagagagagataaaaaagagaactttattgtggcttatctaccgttaattcaaggttggatcgaaaacaaaaatctcctcaatatccccgcggtaaaattaggtgaacgtaatcagatccgtttctcttttgactatacaaatccgatccccggaggctccgttgatcaatgtattacttatcacccagtccctaacacggtagcattagatgaattatcaagctttaattttactggtaactatcgccactatattgctctacctgatttgcgtgtttatagtcatgctgggttcccatttagccgttatgccgatttgtcagaaacccttatttatgtcaaccaatccccttcacctgagcaattaacaacgttattgatatcattaggtaatattggtgcacaaactggctatcccgcgttaaatgtctctttaactgcatcattagaggaattatcaaaacaagaagctgatttattattaatcgggacaattcccccagcactcaataatgataaacagatgaatgtcttgattgataaagcacgtagcgaaattacactgccatcacgtgaaatcaccatttttagtcataccaattatcaagatctagataagcgcccagatagcagaacatctttaacatcaaccggatcactcggcactattattggttttcaatctccgttcttttcacagcgtagtgtcgtggcgctattagccgatagtccccaaggttatcgattattaaatgaagcgataagtgatagtggtaaacgtgatgcaatgcatggctctgtggtattagtcagagagtctggtgtccatagtttacgtgttggtgatacctatttcgtcggttatttaccttggtgggaagaggtttggtatgtttttgcttcgcatcctatttggctagggttagctgccattgtcggtattgtgcttatttctcttcttatttggcaagcaatgaaaataagaagccaacgtcgtcttgcggataaggagtaagttatgatgtggcgcatttgttatcaatatcgccaatatctccttgctcttagtttgctggcaggcattttgcctgtcacgcaagccgcagatgatccgactgaaacttttttatatgagcaagttagactaggcaactcgaaaagtaacgatgttttagtttctcaatcactgtatcgtttatcacttataaaaccgaacgatcctagtgtgttgttaatgcgtatccaatttgctgtaaaacaaaaagaaacagcaaaagcacaacaactggttgagcaattacgtatgcatggcgaaaatactgaacaatatcaacgtgcgattaagctactatcattaacccatgaagataaccgccaaatcctacaaaaagcctacctttatcagactgcgggtcgttatgatgaagccttgcaattatatgatgatatttaccaaggcacgccccctgatgaagggttagcccttgagtatctcaatgtattaattgcttcaagccatgccaacaaaatggcacgtattaagcagatttatcacacttatcccaataaccaacagatagctaatatctatcagcaatatcatcttaccccagcattatctaccgcatcggcgggctctgtctcctataacacactatctattcgtgcattaaaacagcagttacgccagcagcctgataatgcagatataatcggaacattaggcgtgcgctattcgcgcgcaaatcaacgagcacccgcgatttattatctttctcaagcactcacattggctcccaaacacaacgatagtgatttgtggcgtacgctgttgcaatcaaatcaatattggcatttacttgccaaggctgatgaagcgttattaaatcaagagtactctaccgctaagcgctattttacccaagtacgtcaactcagcccctataaaagtgaagcttatattggtttaggggatatcgagttggcgctgcatcaattagagcaagctgaacgttattatcaacaagcgctacaatatcagcctaatgatgcggcgactttgcatagcctgaccaagctctatcgtcaacaatcgcatcaaaaagccgcccaatttatggctaacttaacatcacagcaatacaaaaatttagcccaagactatgggtatatcatttcaggtatacaacaagacttagctgctgatgatgaacagcaacaacactatctcagtgcgattgagaaacgtaaggctatcgctaaagcgtatcctgatgaagtctggaatatttatcgtctggcggatgatttacttatcactcaacaaccccaacttgctgaggattactttaatcaacttaatcaacgacgacctaatgatccctctcgacgatatgcctatgcgttatatctcaataaaacagggcgagcacaacaagcacttaacaccttaaagacgatccctttatcgcagcgcagtgaaagtatgaacgccttagatagccaattacgttttggtcaaattatggcgcatgcacaatcactaagagaacataaccaacaacagcaagctgtcgaatatcttttcacccatattcctcctgagcaaaaaatagaaagctatctgttattagcgcaatgggccgaagaagatgaccaactcaatcaagcattaaattattatcatacagtattaaatttagcgcctaataatgaaacagcactattaggtgcaacagagatatctttagcgcaacatcaaatagatcaagctcgttattacttagctcagatagaacaattatctcctgaaaaatttaaccactattcactaagacgtttagcaaacgctgaaaaaacggcgggaaatattgataaagccaaacactattttatctatttagctcgccaagttgacaaggagccagatagtgctgatggattaattttacgtgatattggtcgtttttatcgtgatagccaacaagttcaatccgctcatcactattatcaacaagcgatgctaaaagagggtatcacggatacactgccaacaaacaatattgaatacaccacacttatgcgtaacaacccaaatgataattggctatcacgtagtgtacgtgatgatgcaagtaccctttatcgtcaacaagagtggcgttttgccctagagcatgattattggggatcaaatggcagtgagggatactctaaattacgcgctcataccaccatgttacaactggatcatcctatttatcatggccgtttcttttggcgtactgattttgtgcacttaaatagtggcacattaggtacagcgccatacgatgctaaatttggtagttgttatcgcataggttgtttccctctaaagcaaaaagcctttggtgttagtcctgctatcggttgggaaaatgagcaatggcaatgggatttaggtaccacgccactcggttttaatgtgactgattgggtaggtaaaattgcttataacgatagtttttatcatctcggttggagtgtagatcttcaccgtcgcccggtaaatagctcactacttgcctttgctggccaacgtgatagttggaccaatcaaatttgggggggcgttagaaaaacggggcttcgtttaagtggcagttatgatctgggaggcaaggatgggtattggggagaaatatcgcttgatagattaacaggaaaaaatgttaaaaataacagcagtgtaaaagccatgggtggttattactataagttaatcaatgaaaatgatcgccgcatttctgttggcttaaatagcatgctttggcattacaataaagatcttagtggctacaccttggggcaagggggttattatagcccacaacaatatctctcattctcactgcccgttaattaccgtcaacgtactgaaaattggtcatgggaagtatctggctctctctcttggtcttattcaaaaacctatgatagcagacgttatccattacaaaatctcggttcaagcgataaatttaattctgatcccataaaagaaatatttaagcatgagagaaatatcattgataagggggattcgggtcatggttttggttatacagcaagagcattaattgaacatcgaataacaccacattggtttataggtgccgctatcgatattcagcaagcgaaaaactatacgccaagccatgcactaatgtatttacgctattcatttgatggatggaatggtgatttagatcttccgcctaacccgcttattccttacgcagattttaaataatcccgtaacaagattaaacaacaaacagacagctaatgcggtccgtttgttgttttttatcgcgtgtgattaaaatagtgatgattattgtggtttgcgaattaacccaataaatagccacccaacaatcatagctgacacaaataatacaccttgggtaaaaccaccccccgctaataccaaacccggtccggggcaaatacccgcaagcccccatcctaaaccaaataagatactgccgaagacgagaggtttatcaatcactgttttagttggaatggccagaggacaggctaataaactttgttgacgatgacgtgcaatttggtaactaatagcactgacgataagacccgcccccataataaataacaatgacggatcccaatctccacgaatatctaaaaatgccaagatcttttgtgggttgctcataccaccgatgatcaatccagcactaaataataggccactaataaaagcaattaatttggtcattatcttagcctccgatgacatggcgttgaatatacacagtcacaaatgccgtcaccataaagacaagaactgcaacaatagaacgacgcgataatcgtgctaatccgcaaattccatgcccactggtacagccattccccagacgtgtacctgctcccaccagtacaccggcaatgatcaactgccaaggtgaaacgtcgataataggtgttaacggtttatcgaatagataaaatagtgtcggtgtaatcaacataccgagtaaaaatgcccatcgccacccattaccttgttggttagtggttaatactcctcctaaaatcccactaatacctgcaatacgaccattaaacagtaataaaatagccgctgctaaacctattaatagcccacccaatgccgagctccaaggcgtaaagtgaacccaatctatattcataagttaacctgctataggacaatatagctgataaagtgtatttaatagcaccaatactttttcatcagcaatagaataaaaaatacgttttccatcacgacgagtattcacaagcccttcatttcttaacacagtaagttgttgagaaagcgtaggctggcggatccctaaactttcttccaattcactgacacttttttcgccctgacttaattggcacaataagagtagtcgatcaccattgcctagcgttttcagcatactagaggcttcattagccgctaatttcatggcttccaataaatcaggttgaactcgttgtgtcatggtaaactccataatcaatatactttttaataatatgttaatttatatattgtgcaagttttcttttattgcgtgttttaataaggcgctatatgctctctaatatgaaaacagtaagagtccctatcgccttagtgcaaagtgttatgcgtacactgcgtgaaaaactgcaacaggccaataaatatcttaatacagattacccagaacccactctacaatataaccagagaggaactattgcaggcagtgcctattatgcaaattgggagatccgtcttaatcctacattattgattgaaaataaacagaattttattgaagaagttattcctcatgaattagcacatctgctagttagtcgccattttggtcgtgtggcacctcatggcaaggagtggaaatggatgatggaaactgtgttacaggtgagtgcgaaacggacccatcattttgatatcagcaatgtaacagcaaaaacgtttagctatgcttgtcgctgccaagaaatacaccagttaactcttcgccgacacaataaagtacaacgaggagaaacccagtatcgttgtcgtcattgtcaggcgattttacaattaattaaagagtaaaaaaagtaagcttggtctttaagactaaacgtcagccgaggttctgagtgacactgagcagggatgttagtataaacactggcaataaaactgcgggaagtcatttcaaatcttgatgaattcaaatgatcaattaagtaaaagtatatcaggcaaaaagatagagaaacttattgaattttatgcaaactatattcaaatacttcacaaaattacagtgaatttatcaaacgttgcatcattgcaagtaaggaagtttatgatgaaaatagaaaggcaaatgcaatatcgcatgtaattcaagtaaagcctgaagagccaaagaaaaatattcctactaaaaaagatcaagagtaatttctcactgagtcatatagccaagatcaaatcatctagcccatccttgggatgggtgatggtatatatcctttagctttaaatgatgtatactttgtatgcgtatctatttcagcgaaggtaataaactatgatttctgaggctattatgatggcaatgctatcaaatccaatggataaaaaagatgtggattcaggcttggctaatttagccatgtcgatagctaccattgttgataaaaaggcaaaaggtgatgtatcaccagatgaaattatggatttaattgttggtggtaagaccgtgctaacgacccttgttacatcaatcgatgaaatagtggctttacttgatgacccaacaaaagatgacataaaaaaatatgcaggtaataaccctgatgaggttatgcgtgaattggaacgaatgattaaccatggtaataatgtagttatgatgattgaggcaatgtatagcattgctaaaactaccaaggcttttcatccatttgaaagcatagctgatggttacttcaaagaagttattattaaaatggctgcactaagaaaccatacacaagcactttatagacaatttaatcagcatattaacccgttacccgcaatggaggttgaagatggattcggtgaagaggatatagcattgtttaattcctcaatagctgaatttaatcaagatctgcttgcaggtaacttgcaatgccgatagtcacaatcacgcccagatataaagataacggtgtttatcggaagtatgcggctaagctatcagctgctcttaatggctcatccctctctgggtatgtaggtaaatttgctgattttaggaatagcgccatagcgcgtcagtcatttattgaaaaggttcatataagaacgccaaatgaaaaaccttgggatggcgaaactcgacaggctgttagagtgagcgataactttttagtgttttgtaagcactgtatgtacgatgattattaccaaattctggcaatcataactcctgatgcacatgctcgttcagctgcgttgcttccaatattggcagatatggcagaaacttattttcattctttatcgcttaaagagttagctggattagatcagttctagccacacatagctcaaggacgacttgcttgagatcacatagcgggtggttttatatttaagacgctgacgcgacttaaacaggctaaagcccataacaaaaaataaagccgataacttgttagtttatcggctttattcggtataaataggggagaattgatatattaagcaaacacactcatagtatgagatgctatttcaaagtagataataagcccagtgccatcaataaacgttgcaataaaaggtgcagacaccaccgctggatcaacaccaatacgctttaataccattggaataatagaagagacaatagcactccaaaccgtaattgaaattagcgttaatcccaccactatcatcacttccatgccaacccctaaggtccaagcacgaataaatcctgctattcccatggttaaagccaccattatcgaggtcgtgatctcttttcttaatactgaccatacattacgcaaactcacctcacctaatgccatggcacgtactaatgttgaggtaatttgtgtaccgctattgccaccagtaccaattaataatggaataaagaaagctaaagagatagcagcttcaagtctgtcttcaaaagcatgtaacaccgtactggtataagcttcagcaataaacagcattaatagccagacaacacgtttacgccacaaagtaaccggacttgtctctaaataaggttgttctaatggcgacgttgccccctgcatttgtgcatctagcgtattttcatcttcaattaaatcagcaatatcttgaggtcgtaatacaccaactaacttaccaaaatgcatcacaggtacactgtctaaaccactttggctaattaactgataaacatcatgtcggctttgctccggtgaaactgagaaaaatgtttggcgcataatatccgaaacaaaaagctcattatcagcaagtagtaatgatttaaccggcaaaataccgttaagataattatctttatctacgacatacagataagttggaattaattcatcttttaaatcattaaccagctgtgcttttacatgttcaaccgaatctgcgacagaaacagaaatataattctggctcatataagcactaacggtagcatcatcttttaaacgatgatgttgctcttgtattgaatgattattgggtgtgtttaaggatgcgcctgccattaatgcagcatccattttatgttgaggagtaaatttcatttttttggttccctatgactgtttgtgtttagcaaatcagttctcaataggggcgaaaccagatgcgagaatgcaaaagctatctacacgtctcggttttagcactatacaacgtatccgatgaatactggaagttacatggagatataccttcggtcgatatatcttgtcctaatcttgggcgtctctcgacgtcgtcagatcagtaacctgtgtttgtataggagcctcgcctaacgagatactgcacttttcttgcgaatgcggcgcgcattataaccactcacattataatgaaaagtctcatcgtagttttgtttaagttctattgataaatcttaaatcgcttatttttacatcattaattaaatactcacctcaaatagagatgaataaaatagttttaaataaattggttattaattgattattttaatgctaatttttgtacttttatttcttcagcttgtgagaagatctcattgactgttttaccatctaacgattgacacatttttcgcgtgatcatatcagcatttttattgcgcccagcaatgactaaatcattaaaattaatatcatttagcatggctaattctattgcttcatcaaagcgttgctgctcttcaagcggtaatgaattgcgcatttctacaatcgatattcgtaatgactcaacattagagccatctagggtttgatttttttcgcaaccagaaagtatgacagtaaataaacaaataaataacaattttctcatatatcccccctttccctatcataaattaaataatagcagaatgtgtatcagtaaactgctaattaagtaaaataaatatttaattcattatagctttacgtgttatatattatattgaataaataaactctctttttaaaaataataacaaaaaaccccgctaataaattagcggggtaaaatagaaggatagataaagaatagataataaaatgaatgattaggctagttcaacatcacctgttaatcgacaactacaggctaaaacataaccttgtgctatctcatcagcagttaaagtactggtgctggtgacctcataatcacctttcacaatgcgtgttttacagctaccacacactccagcacgacaagcagccaaaacaggaacactattttcttccatcgctgttaataatgtcatccccaccggtacgttaatttgctttaacggatgacgaatagtcatagtaagttgttgtgcttcatcaacacacattggctcatcaccaaaacgttccataaaaatattctctgcacaaacaccaagatttttggcaaaacgcgcagtatcttccatataactattaggcccacaacacataactgtacgattggcaatatcaggcactaaagcggctagtttttcttgagaaatacgtccactaaaaattcccttatcatccggcaacttaggcatcataataaaattgagattatagggataagcattagccaactctaaccactctttttcaaaaataaattggctctgttcgcgaatattaaaaatgaccgtgatatccgctttaggttgattatttaacaaccaacgcgtcatcgacataataggggtcacaccgcaccccgcagcgagcattaaatagcgcgttccttctctatctgcacaggtgaactccccttgtgcgtctgataaccagagataatcccccggcttaacttgggatgttaaccacgttgaccccaccccattgtcgatacgacgaaccgttaaagagacaaaaggacttaatcccggagaagacgagagcgtataagctcgcatcgtttcatcgctattattaatactgactagtgcaaattggccgggtttatagcgataaaaatcatggttaattaaattcagtgtccacacttccggggtttcctgatggatagagtgaacttgcatacgattaggacaaagagctgttggcatcgtcatggatattgcttccttaccgaagcctttaggcttcggcaatgatgatgaataaataaattaagcagaaagaatttcttgaagatcttgttctggcgtggtgatcgcacgcataccaaatttttcattaagtattgcgagcaaattatcggttaaaaatgcaggcgcagtcggcccagtataaatattttttacccctaatgagagtagggttaataaaataacaatcgctttttgttcaaaccacgacaaaatcaaggacaggggtaaatcatttacaccacaacctaatttttctgcaagattaaccgctagcataatcgcagagtaggcatcgttacactgacccacatcaagtaagcgcggtaagccctctaatgtgccaaaatcaagtttattaaagcgatatttaccacaagctaatgtcataattaagcaatcttggggaatggcacgagcaagatcggtatagtagctacgttcaccacgactaccatcacaccccccaactaagaagacatgacgaagttttttctgtgaaactaaatcaatcactgtatcagccgcatttaatagtgtttgacgaccaaatccaacagtaattaagtgttcaatttcactgtacggaaatccctctaaagagagcgcttgctcaatcatttcagagaaatcatcacctttaatgtgtttcacacccggccaaccaacaatactacgcgtccaaatacgatcgccatagttccccacattaggatcaataatacagttagatgtcattaacacagggccaggaaatttggcaaattcactttgttgattctgccaaccacttccgtagttaccgactaagtgtttatattttttcagctctggataaccatgggcgggtaacatttcaccgtgcgtataaacattaatgcctttaccttcggtctgttcaagtagcatctgtaaatctttcagatcatggcctgaaattaaaatagctttacctgctactgggcgtacattaacggaaacaggggttggatcaccataagcttgagtttcacctttatccaataacgccataatacgaaagttcatttgaccaatgcccattgcattgtctagcaactcattcatatccgcaggatcggtacctaaccatgccatgtaacgatgatattcagcataaatttcatcatcgtactggcctaaaacatgagcatgctccatataagcagcagcaccttttaagccatacaagcaaagcatacgtaaaccatgtaaatcatcccccacttgcgctttatcattatttaatgcaaagcgttgggcttgtttctgtagactggctaagtcgttgccttctaattgaatttcggctttaggatgagcgacttggatggctgcatttttggctaacgtacgtgattttaagctttcacgtaaataaatagcctctttggcatatccaacaatacgttcagaatcaaaattaacattggttaacgtcgagaagaaagcccgtggcgcaaagctgtctatatcgtgatcaataatatcaacactacgcgcagctaatgcccatgctgacagcccttctaatactgccaccaataagtcttgtagatcagaggtttctgctgttttaccgcacataccttgtgcataggcacaaccattaccaacaggtgttctcattgtttgttcacattgcacacaatacatatcgaattccttctataagatgacgctttatttttataagttgcattaaatatgcaacataagaatacgccatttttatagtaggaaaagtgtcagatgaaataatctgcgccatgtttgatctaacgcaatttattgctgtgcttaagagcttgcttttttttctgttgatttggcttcacacctcgtaagagggtgagtaaacaaagtaaagggcttttcttataagggaaattgagaagaaatgttgcagtgtcgcacgggatgattttgttacatctcagctaaaaaagagtgagatgaatcgattaaattaattagttctcattgtatatataatatctatttattatttttgatagttaatattacctattgcatcaatagctaataaaattactacaattgatatattttaatagtacgagtattacgaaatgaaactatagaatttgacgatactccccctacactggagattaaaaatgattaaattaaataatgttccatccgaatttcgtcccttagaaagctacaaaatgttaatcggcggcgaatgggtatccagtacatcgcaacaaacgaccaaaacctatagtcccgcaaccggtgagttattaagtgaatatccatcaggtacagctgaagacgttgatcttgctgtaaaagcggctcgtaaagcttttgatcattggcgtaaaacctctcctgctcaacgccaagcgctattattaaaaattgctgaccgtttagaacaagagcaagaacgttttgcttggattgagtctcttgataacggtaaaccactcaatgaatcgaaaaacatcgatttacccgcctctattgaccattttcgatattttgcaggcgtgatacgctctcataccgatgaaagtgctgtcttagacgaaaataccctgagtcttgttattcgtgagcccattggtgtcgttggacaaattattccatggaattttccattattaatggctgcttggaaattagcccctgccatcgccgctggagataccgttgttattaatccagccacactcacctcactttcattattagagctaggtcgtattttaaatgaaatattaccagccggtgttataaatattgttactggtcgtggatctgttgctggacaagctattctagaacaccaagacattgataaactagcatttaccggttcaaccaatgtaggttataccgttgcagctgcggcggcgaaaaaaatggtaccagccactttagaattggggggtaagtcagccaatatcgtcttccctgatgcgaatatgaaaaaagccgttaaatattccgcactagcgatattgatgaaccaaggacaggcctgtgaatctggctcccgtttattcttacatagagatattcatgacgcattcttaaaagagttaaaagcagaatttgagcgtatccgtgttggtgatccacttgatcctaatacacaaatgggtacccaagtcagccaagcgcaaatggataccattttagggtatgttgaactggccaaaaaagaaggtgcaaccatactcacaggaggtgagcgtattacgggtgaagggtttgatgatggcttttttgttcgcccaaccattattatcaatgccacaaaccaaatgcgtgtcgcacgtgaagaaatttttggccctgtattatgtgtgatcccatttgataatgaagaagatgttattgaaatggctaatgactctgaatatggccttggtggtggtgtctggactcaagatattaaccgcgcactacgagttgcaaaagccgttagaactggccgtatgtgggtaaatacttatcatgaacttcctgctcatgcaccatttggcggttataaaaaatcaggcttaggtcgtgaaacgcataaaatgatgttagatgcctacagccaagtgaaaaacatcttcattagtaccaaagaataattaacctctagttaagcatattcttataaatataattatctatactcatctcttagccttctccccagaaggctttttatttgctgtaagcaacaaaaaaccgtatgcgcttttcctaatatctaatattaactgctcacatacggttattcgtttagatggtcatttagccttagataaacaaacgcgtttattccgcttctgcttcttttttgcttacagaattcacttgttcatttagatcaatatcaaccgcattaacatcttttatatagtcttttgttagacgataaacgatggggctaagcagtgctaatgcaattaagttaggaatagccatcatcgcatttaatgtatcagcaagtaaccaaacaaattctaaggattgagtcgcgccaattggcaaggcaattaaccatgcaatacgaaaaggcataatggctttcggtccaaatagatattgcacacatttctcaccgtaatagctccaacctaaaatagtggtaaaagcaaaaacagccaatgcgatcgcaacaatatagttacctccagggatagccatagagaacgaacttgcagtaagtgttgccccactttgccctgtcagccactgtccggtgatcacaatcgttaatccggtgacagaacagacaataatggtatcaatgaaagtccccaacatggcaattaagccttgacggatcgggttttgtgttttggctgtcgcatgagcaatgggtgcactacctaatcctgcttcattggagaatacacctcgtgcaacaccaaaacgtattgccgcccaaacagccgcaccagcaaacccaccttgcgcagcaaccggtgtgaaagcagattttacaatcaacataaatgcatcaggaatagcagtaatattcagtgcaagtacgacaatccctgccccaaaataccctactgtcataatgggcactaatttaccggcaacatcagcaatacgcttaattccaccaattaatacagcaccgactaaaataactaatgcaattgctgtcactgtggtagaaataccaaaattactttgcaaaacatccgccactgagtttgcctgtaccgtattacctataccgaagccggcaaaactaccaaaaatagcaaatagcgttcctaaccaaagccattttttacctaaaccgtttttaatataatacatcggtccgccaacgtagttgccgtatttatcaacctcacgaaaacgtaccgctaacacagcttctgaatatttagtcgccataccgactaaagcagtcatccacatccaaaatagcgctcccggtccacctaatacaaccgctgtagcgactccagcaatattgcccgtaccgatagtggcagaaagcgccgtcattaatgcattaaaaggtgagatttgtccctcacctcttttatcatttttctcaaataagagtttaaatcctgtacctaattttctaattggcagaaaagagagtctaaactgcataaatagaccgatgcctagaatgccgactaacatcggtactccccacaccacgccattaatagcgcttaatatatttgtgatgaaatccatacgttaccctttttatccaaatgttatgtaaatatatattttttgttatcagatacactaaagatgaaaaaaaggaaatatgctagaaaaaaaaccgactaattatgaaattgattacattatgtgagaaatatcacttgatgattaaattacgctattattagatacattgttatttatatataaaacataaattatgtatcagcgaaacacgatcaaaaaatcgcaaaatcaacaacgctttaattggtttagaaaagcgaaagaaactaaccttgccccggtgaaaacgcttattctttccgccattatcggtacgttagccggattaattggggtactatttgaaaaagccgttggctgggtcattcatttaagacaagataaattagccgaggtattaaccaacccttatcttttggctattggcacgttacttgtttcctctcttttagccatgagtggctactacttagtgaagaagttttcaccagaatctggtggttcaggtataccggaaatcgaaggggcaatgatagatattcggccagttcgttggtggcgggtattgccagtaaaatttatagccagtatcggtaccttaggctcaggtatggtacttggtcgtgaaggccccaccgtgcaactaggggctaatattggtcaactcattaatgatgtctctcgcgttaaagataaaggaacgcgccaaacactattagccacaggggctgctgccggtttaacggctgcctttaatgctcccttggcaggcattctatttattattgaagagatgagaccacaatttaaatataatcttatctctattaaatccgtcttcattggcgtgatcatgtcttgtattgtatttcgcctaattaatggtgaaggaggcgtcatacagataggtaaattttcttcagcgccgatgaatacactgtggctctatttagtgttaggaatgttatttggtgttgttggggttatttttagtaaattactgttttatgttcaaacacaattccaacatttttatcaagataaaacctcacgttttgttttagccggtggcgtgattggtggtgcatgtggtttacttgcgttgattattcctgaaataaccggaggcggttttagtattattcctgcattaagtgccggaggatattcgttaactgcactgctaatattttttgtgttacgtaccatcaccaccattatcagcttctcctccggtgcaccaggaggaatttttgcccccacattagccttaggcacactctttggtagcgcttttggattaatggcaacctatcttttccctgattatcaaattcaaattggcacttttgctattgctggaatgggtgctttatttgccgcaacggtgagagcaccactaactgggattgtgttagttctagaaatgaccgataactatcaacttattttgccaatgataattacctgtcttggcgcaaccatgctggcgcaattattaggcgggcgacctatttatacggttctactcgaaagaatactacaacgctcagaagccaaagaaaaaacagaggctcccaaagagcccctatagttttcaaatactaaaataccctcgctgtgatctaacgagggtatttttctcaccatctatttattattttttacgcgcaattaatgtcgcaaaattaagttgaatacgattaccattagcatcagttttatgtagatgccctggattttcattatatttaataatatcccagccttggtaataatccgctaactcaccttggcgcaagaaggttttgaaaggaacttcagcagatccactatttgctgtttcaacaggacaaacaatgacattaatcccctctggatttgtacactcctgcatatttttaataatatctgcgatacgttgacgctggcaaaacatcaaaaccacagtagaaataataatatcgtatttctcatttaatgctgcttcatttatatcatataagccgcttttgatcgctaaaccggttttagctttgacggcttcaattgcatcaatatgagcggcattaatatctaatgcggtcacatcataaccttgtaatgctaaatagaagctattacgaccacgccctgcgcctaaatcaagcactttacatggggtagtcaatgttgccatataacgcacttccgaatgaggtaatgacaaatcattttctttaaaaaatttatcttcgggagtgcataaaaaagagagctggcaaagcacatcatcactcgctttatcgattttatgccattgctgaggttgaataagcggaggctgattttcgctatcacactctaggaacacttgttctccattatccttaaatagcacaaatgtcatactcccttgtaatatccgcatttgcgcataagtgccttcttttgtgttatgacgctctaataatgctaaagggatcgctgttaagtgccattcaggtagcgttttatacgtaacaagttccataattcaacctctcttaagatgcattttaaatacatcttattgcaatcactctcttaggtaaagggtgatttttgacatacattattttaaatatttattgattaataaatcagtaacatcagacgaattaatagattcaccacaaaggactttcatcataatttctttgcctaacgaagctaaagacaacagcatatctggacgtaatcgacttattttttctctattctcatctttattaatgatagtgattaatttcgcttgaagatctgggcactcttgaatagttaataaaataaaggtattttccgcatcactttcagataacgtcgccacccaactcgcttggcgaatatttgccgtttgtaatgtttttacattggttggatcaccttcaataatattggcttctttatcatacatggcttgctttttatccgaacaaatcgcaataaccggtttaccttgctctctaagccctttctctaattgtgctgccaacattgaagagccaataataataaaatgatcatgcattttagcgatccttttcttcacaatatcgcgagtaccacgagccaaaaatcccatcacataaacaatagaagtcgtaaaaacagtgatccccaaaataaccactgttagggtaaacattctcgcattacttgagataggaacgatatcgccaaaaccgagtgttgtcatacagacaatggaaaagtaaaaagcatccattaacgttgtgatatgtggtttaaattcatcaccaatatagaggctgcctaacatagagaaacacagtagcgaaatcgtacagataaaagcaacaaaaccggcactggttaaactatgatgaggaaaagcacgccggctgataaccaatacaatggctaatgctaatgaagtataggcttgagtaccagcttggtgataaaccgcgacatctaaaaaaacgatcgtcactaataatattaatgaaacgcaccacgcaatccgcgcccccatatacataaagaaagagagcaaaataagtgcactcgctaacatcactttaggaatatcaagtaatttcaatatacctaacgattttagccaatcagcaaaaccgtgtatttcccaatcaagataaacaccacgagaaagtaatatcgagtaaataataaaaagactattcaagatcaataagaaagacatcgtctttctgctaaaagacgatgtctccataaaattaacgactgccgataacttcatttttatctaatttctattaattttgtattggtatattttctaaccctttaaatttaaaaggtttcgctggcttaaactgagagcttgcatctcctgaataaatcgttgactgctcttggcctaacgctaacatcatcacttttcctgtttcttttgaaaaatcaatttgtttcaaatcaacccaaaaagtatttggtgataatgcagattcaaaaaagtagagctgatttttatgatcagcgacagttctccaacgagtcgatgatatttctggagattctacggtacttaatccataaggcaccgaaacattgcggatcaccccaaatacactggcaagtgattttttgctcgattgcgatttaggaatagcattaatataaaaagaggctcttgcaaaacgatccgatgctctattagtacccggtaacattaccgtaccaccaatctgctgccaatagctatttaatgctaactgttcagaaaatataggggagttagtcatcacttgatattttcggctatggtggatcacctgtttaccatcaatatattcaataattgcgctatcaccagaactgtcagacaatgataaatgtaacgttgcgactctatcctgtccgggtactttgtctgttaagacaataaaaggctcatcttttaaagcagttaccgcctcttcaacagtagcaaaattatctaatacatattgtgcccatgcagaaatagccattgcaggcttatctttggaataacttgggtaatctgattcagcaagccataataaattagccactaatcctttttcattaataccatcagtagtagaaatatcataacctgatgcaatcacactaccatattttgattgccattgaactgaattatcaccagcctcaccagaacgttgcattccttgagggaatatccataaattagtaccaatttcgtatttccagtccatagaacgagcggtaattatttggttattttcacctaaataaacaactcgggtacaagcttgcgccgtagttatactacttaaaaaggtacctgaaataattaatgtacttaataaagtatgtcgtaatttttttagcataatttttcacctttaaattattagataagcttaatcttattttcctcattttgaccactttcttatcacttataaaaaataaactctctaataattaataacgatttatctatcttacagaaattttcttaagtaagtataagacaagttacgtatcttaagtaaaaaaaaactgatgctaaaagcatcagtttttaatctattaggtgatatcgcaaattattgcttaccaatattcgctacgtttaattttttttcacaccttcaacagagatgattaattctgcttcttgcgattttggtcctaaatctgatttaaagttaaactctttcagattaactttacctgttgcttcaaaaccagcgcgataccctttccacggatcagtaccttcaccaattaattttgcatttagtgaaattggttttgtaacgccattaagtgttaaatcacccgtcaccgtataattttcaccatcacgagtcactttggttgagacaaacttagcttcaggatatttactgacgttaaagaaatcagcactacgtaagtgtttgtcacgttcagcgtgattagtatctaaactacccgttttaatcacaacatcgactttatcttttgaaggatcttctttatcgtaagtgaagcttccatcaaaatctttaaatgtgccgtataaccagctataacctaagtgttggatacgaaattgcacaaaagcatgttgcccttgtttatcaatttgataatcagccgctaatgctgaactagcattaaataataatgcacctgcagttaaactcaataacgccttcttaaacattgttctctccataatattgttattaacagggtaatataaatttaattattgtgtttttatgccaagcatacgtttcaatgtaatatctttatctataaagtgatgttttaatgcacccgcggcatgtaatagcgataacacaacaaccgcccaggctaaataaagatgtacatcaccggctaaatcagcttgttccccttcccctgtgaaaacagcaggtactgagaaccaatcgaatacagatattggctgaccatcagcagtagaaattaaatagccacttataatgatggcaaataaaattagatataacagcatatgagccacatgggcactaatgcgagtaagtcggctatagctggataatgctgttggtggaggagaaatccaacgccaaattgctcggaaaagaagaacaataaatagaattatccctatacttttatgtatttcaggggctgaatgataccagctatcgtaatagcctaaatttaccatccacaatcctagggcaaacatgccatagacggttaatgctgtcccccaatgtaaaagaagcgacaagtgcccatagcgagtagatgtattccgccactgcataatgatcctcaatcgatattttattaacaagccgttaactatattagtagattaaatataaaatgttagtctaaaattcaacaaattatttgtttatctttttcaataataatcaatgagtcattatcgcttattagttgccttattgattaatttatcaatataattattgattataatatatacaaaaaacagtatataggcgatttatgtaacagtaaagtcgaaggtgtaacaaaaaattaacttaatattattactgtattaatattgttacgataaaagaaaagtagcgaaatgaaatgagaataaataggcgagtcagttaattttaatatcgaaaaaatttacaaagctatatatgatttacttaacatcgcctaaactcaagaattagaaaaaatgagtccaaccacaaaaattaacagcggtagtgtaaaaaaaacagatagccagcgcatttcatgaataataccccaaataattccaataaagctaataataaaaataactgaaataagttcagaatagtgttcatgaaaataacacatcaagaaataaaaccaaacatcctcactatccatacaacaatctaagccttcaaaataatttaaaataaagatagcaataaattactattattatctaataaggcaagtaacctattataaatattagccattgcgcacaaaaacactaatctattttaaattagtaataaacaccaacaaaacaacttaaaatatggtaataaattaaatttaaaatgaattaaaaaacacaatcacaaataaaaaatagcccaccataagacttaaaataatataatgggttttactttagacttgaaataattatttcacccaaagttaaactcaaaaaaatagtttcacattatgataataaaccatcttacttttaacacgaatagagattttaacattgaataattacctttaggttatttatttaattaaaattaactcatgatttcattttaatagttattaactaaaaacattcaatttgacttgaaaaaacactacaattgtagccgtatttttattgagggcactatgtctactgcaacaaatctgaatgaactacaggaacaagttcgctcccgctataatggattaagtaaaaggctacagcaggttgcacattatcttttggataataaaaacagtgtagcatttgatacaatcgcgatccttgcagataaagcaaatgttcctccatcaacattaatccgttttgccaatgcatttcatttcaaaggatttaatgaaatgaaacttttatttcaacgtcatttaatgggtgaaatggataatgaaaaattaacctataagcagcaatacaaaaaggaaccaccaaacttaaatgagccagattatattctgcaagagtttgcacaagccaatagccacgctttgcaacagttagctcatcaaacccataaggatatgttaaataaaactatacaactacttgagtatgcagaaactatctatataggtggttttcaccattcttttagtgctgcgagctatttttttcacgcgctttctcatatcccttgtgaaaccgtctttgttaattgcctagggggaatgtataaagaacaacttaggaatattacacatagagatgtgctgtttggcatccatttccacccttattcagaagaaatgcaaaaaatgtgtgagattgcagcttataaagaggctaaacaaattattgtaacagatagccccataagcccattagcaagtctaagtgatgtttgtttaactgtaaaagaagcacaaataaaaatgtttcgttctcaaacctcaacattatgtttactacaagcactttcagttgcattcgcttttagaaaaaagagccattaacatattatttaaaactgcatcttatataaggtgcggttttattaaaaatagaataaataataattaataaaaataaattaaatagcatgctatattaaacaaaattaattttaagagtgatttcatttattctagattgtgatgagaaaaagaatcatttagcatttattggcaactctgttatccattacaggacgaataacatgctattaaaaaaaatatttttagtgtcttttttattccctacactctcttacgctaataccttaccaacatcaaatatagataattcactaactcccaaccatgataatcttgcccgtttttcactcggtgacaatagtcaagcatccggcagcggtgccactgctataggtatcaatagccaagccaccaatactcgttcggttgctattggttatgctgcattagccaatgaggaaaatacggtttcatttggtaatagtgaagagaaacaaacagcacgactcaccaatgtcagtgaaggtaaaaataatactgatgcagtcaatctggcacaaacaaaagcactacttagtaaaaataaaaggttaactgatagccaaataaatgtttttagaaatcaaactaataataacttaaacaccatcaaaaaaaccattcatgagtttgatgattattatcgaagacgacaagcatcaattaccgatgcaattgaagcacttgataaaaaagttatttcattagaaaaaaaagtctatgcaggtattgcttcctcaattgccatgagcaatattccttatcttactcatcatacttttagtggtggcctcggtattagtaattatcgtactggcatagcacttgctggaggtatccaatatcagccaaataatgatatagcatttcgatttaactcatcaattaatagtgaacaagagcttatttttggcggcggattagcttatggctggtgatcttattaattaacctcacctcttaataagaaagttttttattatttaagcagtagtatccttattgctgcttaacaatatttttctaaataaaataaatgcataacacttattaaaaagataagcttatcttctgtttttattcccttttgtgatagtgacatttttcctataatgacataattctccataactgaaagagacacaacatgagttatccattacgaaaaatgaccctcgctgatatcaaagcagtgacttcattactacaagaaaactcacagtcacagcaaggtggattatatggtgattatccacacgataaagttgaagctatgtaccaaagtagtaccaatgccatagtcgcaactgaccaagaacagattatagcagttgttttcagctttccggtcagttctttttctcttccacctattgctcaagaaattaaccgacgttttcctagccttacatacaataattggttttacggtcctgtatgtattgataaatcataccgcggaaaatcgctattaaccgatctttaccaatatatttgtgcgttacaaggtggtcgcccgattgcatttattaatagtgaaaacatccgctcgctaaaagcacatcaaaaattgggtatgaatattgttgaaaattttcaatttcaaggaaaagcatggtgggtaattagtggataatgaaaacaaatgaaagaaaaagtacgcatatgtattcttcaatgagttacgatatcgaacagtgataatgagtattatttataacaaaaataaatttatatataaaattaattaaaaatcaatatgttattagtatttcataaattaactcataattattaacaatatttgaacccgacttttctctatcaaattgcttacaatttgacaccattctgtgatctctccttcaattctagatctttcgttaacttactttttgatcttacataaaagtataaataagataaacaccaccaattcgaaagcaaacgtaaaataggaggaagcaatgactgtttcccgtagaacttttatcaaaggtcttgccgccagtggggctgcaatctctgtttctacacctgctcttgctacttcaggtgactttacagcaagcaaacgcactcgaccagaaaatgcacctaacttattaattgtttttcctgatgaaatgcgagcccatgctctacagtttatgggggaagatccatcgattacaccaaatcttaataaatttgccaaacaagccaaagtaatgacacaaatggcatcaaattaccctctatgctccccttttcgaggcatgtttatgacgggtcagtaccctgtgcgtaatggtatcacaggtaatgcccatgattacggtggaaaagtaggtattgacttgtctccttacgcaaaatgctggtctgacgtacttaaatccttagattatagcactgggtatattggcaaatggcaccttgatgctccctatgagccttttattgaaagttacaataatccaatggaaggtcgttattggaatgaatgggctgctccagataggcgtcatggttttgatttttggtattcttatggtacttatgacttacacttgaaaccgatgtattgggcaaacgatacacctcgtgataaaccgatttatatcgatcaatgggggcctgaacatgaagccgatatggcaatcaagttcctcaaaaatgaaaataatcaatttagagataattcaaaaccatttgcattagtggtttcaatgaacccacctcactctccttatgatcaagtaccgaaaaaatacctcgatgcttatcaaggtaagacatcaaaagagttaaatacacgccctaatgtacagtgggacagtgaatatcaagaaggttatgggcctcaatatttcaaagaatatatggcaatggtcaacggtgttgatgagcaatttggtcgcattgtcgatgaattagaaaaacagggccttgcagataatactctcgtcgttttcttctctgatcatggcagttgcttaggatcaaatggacaagcaacaaaaaataatccgtatgaagaatcgatgcgtgtccctatgatgtttcgcttaccgggtaaaatcaaaccaggttttgatgatgcattaatgtcagcacctgatatttacccaactattttagggttacttggtttatcggaatggatccctgattcagtagaaggcacagatcttgcagatagagtcatcacaggcaaaggcgacacagcaaactctcagctttatctttttattccttatggtgaaccttcattcggtaaacgaggtgtaagaacaaaaactcatactttggtgatagataggcaagatgggcaaccattaaaatatactttatatgacaatgtgaacgatccatatcaaatgaaaaatattgccaaagataatatgcctttaattgataaattaattaaagaagaattaaccccttggttagaaaaaacaggagattcttggagagcgactgaatttattacagcgacaacgaataaattaaataaaaaaatatcaatatgtgaagaaaaataataaaaacatctgcgccataaccttatggcgctatatataaacctaattcgctaatataaaaatccttttaataaaataaaaggaagacgtcctacatctaaaaatagatataaataaaagcgaataaagaattggatatagaccatgaacaaacttcgtattgtgcttttcttacctctttttggcttagctttaacttcttttcattctcacgcagcaacagttaatgcgatgttctcgtgggaatctgctgattatgatacatcgaataactattctggttatcgtgttgattttaatattaatccagacaaatcgaactggtattttgacgtcggttttcgtcagcgtgaacatgacaataaaaatcgttatcagcgttatgatttacaaggtagttatcgttttaaattaaataatggttggatacaaccaggattaaaaatacgtcaagatttaactaactatgataatggtagccgtttaactatcgacttttatgaatcaaaaacaaattatcaatttcctattaataaagactgggttttaaccggtagtgttttgtttggattacaaaaaaaagaggacaaacgaagtaatggcgtcactaatacggattatttaggttgggaaattgaacccggtattcgctactttatcaccccgaatctaaatacaacagtggcttattttgatggtggaaaacaagcaataagacatgaagagtatgatacaaaagaaacaaatcacaatcagcaattacgtatgtatgtaaactggacgacacctatcggtgttattatttcgccctcaatgcgtaagtctatttttggaaaaatagaagacagaacaaataaaggtgaatatatcgataaagatatgactcgttataccttacaaatggcttaccaaatatctcctcaatggcgtgttatgacagaatattataatgagcgtgttgagaataaaaataacggcagcaagtcaactcaagattattttaaagtatcggtaagagcaactttctaataattaaaaccatataatagtcataaggttatatctcatgaaaaataaaaatttgttatttttaagtgctgctgtcctttcagctatatatggctcagccgtagcggctgattgcgatagtactttaaccatttgtgaaaccgtaaacattaataatggcgatacagcgcaaataaataaagatgttaatgtatcacaaggtgacggtgtagtatttaatggctcatcaacagaatataaagctcaagcaattacaaaaaatattactgttactggtaatggagcaaatgcaattaaaataaatcagggagctacttttagtagtaatattaatttaaatggcgctaacgttactagtgaaaatggtacagcaatattagttgaaggtaactttcctaaacgaggaacaggtgtttatatccgagatggcgctattatcagaggaaaaaccgcagcgattgattttagcactttaaaaacaggctttagaagtgatgttaatggcgagatccacggtgatattttagggaataatcatgtggataccaaaatcaattttgcttatcagggaggagcacaaaatgcattatttgacggctataaaattaccggtgttcctttaattgaaaaccatggcaatttaactatccaaggtaaagataaaaccattcaatgggaaggtaacttcatgaataaggaaaatagccagcttattttccgccttgatgataataccaatactgatgaaactatcttacatgttaccggcgatgtcacctttaaaaaaggtagccaagcaaaacttgattttaaaggcaccagtgttgataacatcattaataaagatattgtattaattgcttcagactcggcaattaaagatgaagcgggcattacagtgactgatgcaaatgccatagcgccagatatttcacctttattagaaaaaaccgattcatggttagaaacgacaccaccaaatattagcggtggtgtcagtggtaatcaattaattgcgcgttatggtattagctacgaagggggggataattttattagcgctgctgaacgtggcaatgtcacagagaatggattagcagcagctaattttattattccaacagtattaaatgaatttaataatacacgtagccaaatttcagatgaagcattaagtttattagtcgccgctggtaataatgataataatattgctgcactatcaaatgatctggcgcccattgctgatggtagtgatattcaagcaggattaatcatggttgaagatatgcgcaacaatattgctcatcgctacttacgctatgataatcagctccccattgaagaaagagaaataggttggaatagctgggcaaatattctgtacggttatggtacgcaaagtcaacaaggtggaattaacggctacaatacttatcgcactggtattcaaatcggtactgattatgaaataaatcaagatgcgctaattggcatttctttagcatataactacgctaaagccgatgctaaacaacgtaatgcaagcaaagaaattagccattttgaatttatgccttatgccggttggtatagtgatacattattcttaaacggtaatttaaatattggttattacactgtcgatagtgagagggatattggtggtaatacgggatggcaaggaaataccaaagcaaaaggtgactactctggtgtgcaattaggctatcagattaacgctggcacctatttggattttgattttatccatattaaaccgatgctaacttaccaatatcaatggctcaatattgattcttgggaagaaacaggctctacattatctatgcgtacttatggccaacgctacgcagttaatcaattaggtggctctgttgctttatggaatgactaccaaacctcttatggcaaattaaccccttctcttaaccttcgttatatcaaagatattgcaggtaataacgatattaatcaacgccacagccttacctattttaatactggaggaagcaccttcgatattaaaggaaataccgttggtggtgacatcattagtgctgaattaggtgcaaaccttgatattacccaatcgttaaatttaggtacaacaatgggatatcagcgttatgacaaattcaatgaagggcgtatcggctttactgttagccagcgtttctaaggagaaaatataatgccgatatttcgttttactgcgcttgcaatgacattggggttattatcaaccccctatcatgttattgctgctaccagcaatcctgcatttgatcccaatcatcttatgcaatcagaaatctatcattttgcacaaagtgatccattagctgatttttcatcagataaaaattcaacactaactttatctgataaacgtagcattatgggaaaccaatcccttttatggcaatggaaaggtggcagtagttttactttacataaaaagcttatagttcccacagataaagaagcctctaaagcatggggacgcgcttctacacctgttttatcattttggctttacaacgaaaaacctattgatggttatctcactgttgatttaggggaaaagctcaatgccaccagcgaagcccaagctggctttaaagtaaaactaaatttcactggctggcgtgctattggtatctctttaaataacgatcttgaaaatcgtgagatgactttaaatgcaacaaatacatcatccgatggtactcaagatagtattggtcgctctttaggtgcgaatgttgacagcattcgttttaaagccccttctaatatcagtcagggtgaaatttatatcgaccgtattatgttttctattgatgacgcccgttaccaatggtctgattatcaaataaaaacacgattatcagagccggaaattgaatttcacaccgtacaacctcaattacctgtaacaccagaaaatttagctgcgatagatcttattcgccaacgtcttatcaatgaatttgttggtggtgaaaaagagacgaatcttgctttagaagagaatatcagcaagctaaaaacggattttgaggcactgaatattcgccctctttcggatggaggaatgcaaggtcgacatcttatcaccgataaacaaactatcatctatcagccagaacagcttaattctcaagacaagcaactttttgataattacgtcattcttggtaactacaccacattaatgtttaatattagccgtgcttatgtgctcgaaaaagatccaacacaaaaagaacagctaaaacagatgtacctcttgatgaccaagcatctattagatcaaggatttgtcaaaggtagtgccctagtaaccactcaccactggggatatagttcacgttggtggtatatctctacattattaatggctgatgcactaaaagaagctaatctacagacagaagtctatgattctctactttggtattcacgagaatttaaaagtagttttgatatgaaagttggcgcaaatagctctgatttagactattttaataccttatctcgtcaacatttagcgctattattacttgaacccgatgatcaaaaacgtattaacttagtcaattcttttagtcattatatcactggtgccttaactcaagtaccaccggggagtaaagacggtttgcgtcctgatggtacggcatggcgacatgaaggtaattatcccggctactctttcccagcatttaaaaatgcctcacagctgatttatttattacgagaaacaccttttgctgtaggtgaaagtggctggaataacctaaaaaaggcaatgatttcagcatggatctatagtaatcctgaagttggcttacctttagcgggaagacacccctttaactcaccttccctacaatctatagcacaaggttactattggctcgcgatgtctgcccaaccagcgccagataaacagttagcatctatttatttagcaattagtggtaaatcgcgaaatgaatctcccactatttttggtgaagagataacgccagcgtcccttcctcaagggttctatgcctttaacggtggtgcctttggtattcaccgttggcaagacaaaatggtgacattaaaagcctataataccaatgtatggtcatctgaaatttacaataaagataaccgttatggccgttatcaaagtcatggtgttgctcaaatcgttcgcaatggctctcaactttcacaaggctatcagcaagaaggctgggattggaatagaatgcctggcgccacaaccattcatcttccgcttaaagaacttgatagccctaacccacacaccttgatgcaacgaggtgagcgaggatttagcggcacatcagcccttgaaggaaaatatggcatgatggcgtttgatcttctttatcccgctaatcttgcgcgttttgatgctaactttaccgctaaaaaaaccgtcttagcggcggataaccatttaatttttgtcggtagcaatattaatagcagcgataaagatcaccctgtggaaacaacgttattccaacatgctattacgcctgagttaaacactatttggattaatggccaaaaaatagaaggttttccttatcaaactacgctaaaacaaggagattggataatcgatagtaatggtaacggttatttaattactcaagcagaaaaagtgaatgtcagccgccaacaccagacttcggctgaaaataaaaatcgtcaacccacgcaaggaaattttagctccgcatggatcgaccacggtattcaacccaaagatcatagttatgagtacatggttttcttagatgcaacaccggaaaaaatggcgcaattagccgagaaattccgtgctaacaatgggttataccaagttattcgtaaagataaagatgtacatattatttacgataaactcagtcaaataacaggttatgcattttatcaaccagcagtcattgacgataaatggatcaaaaaagtcgataagccgtccatcgttatgacacatcaggaaggaaatatactgacggtgagtgctgtaacacctgatttaaatatgactcgccaaaaagcggcaacccccgtcaccattaatgtgacagtgaaagggaaatggcaacccacagctcaagacagtgaggtaaaatataacgtttctggggataataccgaacttattttcaccagttactttggcattccacaagaaattaaactctctcctctctcttgattaaacctttaaaggagcgcattcgcgttccttttttattttgcaggaaatctgattatgctaataaaaaattctttagcttatgcgattacactaagtttctgcttatccttacccgcacaagcattaccttctctttctcatgaaccttttggcgatctttatctttttgaagatgaaatgccaaataccttgagcacctcaaatgaccatcagctatcactaagtaaagagcatgctaaagatggcgtacagtcactcaaatggcagtatcaaccccaatcaacattaacacttaataatgaagttaattatcaagatgataaaaatacagcaacaccactcacttttatgatgtggatttacaatgaaaaaccacagtcaacgccccttacattacaatttaaacaaaataatcaagtagcattaagttttaaaacggaactgaatttcacaggttggcgaggtattgcagttccttttcgtgatatgaaaggctcagcaacaggcaaattagataaattagtcattactgcaccagatcaagcaggtacgcttttttttgatcaaataattatgagcgtacctttagataatcgttggcctattcctgactatcaaattccatatgttaataatgcagtaaatacaatggtgagtaaaaattggagtgcattattgatgtacgatcaaatgttcacagcgcattatcctacattaaattttgcgactgagtttcgcgatgatcagcctgaagtggcatctatttatcaacgttttgaatactatcaaggtgtcagtcgtgataaaaaaatcaccgctgaaatgatcgacaaaaatttagcattatggaaaaaattagccttagaacaacatgctgatggctcaataaccgcaaaagcccttgatcatcctaatcgccagaattttatcaaagtcgagggggtctttagtgaagaaacccaaaaagcattacttgatgccaacatgctaagagatgtaggcaaaacgcttcttcaaacagcgatttacttgcgtagtcactccttatcagcaatcgatagaaaaaaattagaaacgctctatttattaggcactcgttacgttcttgaacaaggtttcacacgggggagtggttaccaaattattactcacgtaggttatcaaacaagagagctttttgatgcatggtttattggtcgccatattctagcaaaacataatctgttagcaccgacacaacaagccatgatgtggtataacgcaacagggcgcatatttgaaaaagataatgaaatcgttgatgcaaatgtcgatattctcaatacccaattacagtggatgataaaaagtttattgatgttgccagattatcaacagcgccaacaagccttagcacaattgcaaagttggctaaacaaaaccattcttagttctaaaggtgtcgctggtggctttaaatctgatggctctatttttcaccattcacaacattatccagcttatgccaaagatgcatttggtggcttagcgcctagtgtttatgccttaagtcattccccttttcgtctttcatcaccagcacatgcacgcttaaaagatgtattattaaaaatgcgtatctataccaaagaaacacaaattcctctggtattaagtggcagacatcctacggggttacataaaataagtattgatcccttcaaatggatggctcttgcaggtacgcccgatggtaaacaagagctagatactacattagcagccgcttatgcaaaattagcaaacaaagatagctttgaaggtattaaagcagaaaatgaaccggtaggtgcatgggcaatgaattatgcttcaatggcaatccagcgtagagcatcaataacagcgccacagcaaagctggcttgctatcgctcgtggttttagtcgttatttagtgggtaatgaaagttatgagaataacaaccgttatggtcgttacttgcaatatgggcaacttgaaattattcctgcggatttaactaaatctggttttagtcatgcaggttgggattggaatcgatatccaggaacgactacgatccaccttccttatgatgaactagaagcaaaactaagccaattgccaagtgcaggcatagaagaaatgttgctttcaacacaacgttattctggtgccaatacactaaataataacagtatgtttgccatgaaattacatggtcacagtaaatatcaacaacaaagtctaagagcgaataaatcctatttcttatttgataatagagtgatcgcattaggctctggtattgaaaataacgataaacaacatacaacagaaacgacactgttccagtttgctgttcctaagttacaatcaattataattaatggtaaaaaagtgaaccaactcggtactcaattaaccttaaataatgccgatacattaattgatccggcgggtaacttgtataaattagctaaagggcaaacggtagaatttagttatcaaaaacaatactctgttgatgacagaaattcacagcaaacagaacaattgtttgcaacagccgttatctctcacggtaaagcccctaaaaatgcaaattatgaatatgcaatagccatagaagcacaagataataaagcgcctgaatacaccgtattgcagcataataatcaacttcatgcagtaaaagataaaatcacgcaagaagagggatatgctttttttaatgccaccgaagtcaattcatctcaagctttattattatcaagtgattcccccactatggtaatggtaaaaaaacaaaaacaacaattaacgctaagtattgttaatcctgatttaaatttatatcagggtattgaagctgaccaaattgataataagggtaaccaggttgaagtgagtgtttattctcgccaatggcttacagccgatcctcaaccaataagtagtacagttactgtaaaagggatttggaaattagccacaccacaattaggtgttaatattagatatcaaaataataatacgctaattacaacaacgactatacaagcaataccaataacagtttatttaattaagtaaaagtcgtaacttttaaattaaagagtctcgatataaaacatcgagactctttttatttataaatcaatttagcgaatcaattattttatttaaataataataaatcatatcttcatttattattgataataaatctgttgtctcattttaataatttgttatgctctgcgccgggtgcttggatcaatctggttcaagcattatgccaataccagaaagagaaaagccccggaaaatatacagtatattaaccgaggcggactcaaacatagacaatttgattctgcctccattcttatcggagcgcaagaggaaatgaaaaaatattctttaatcgggctaataatggtcgccatgataacaccgagtaatctattattagagcagaagcctgttgtttattccccgctaataaggagtatttaatggttcaggttaatacttcactaattgagtattaatcttgtgggggagttatcccccacaatttcctaattcgattgttgtgttttaatctaagcaccctaatttataagaagaggtaacaattttatgttacctcttcttttatttataactcaacttaacgaatcaattactttatttaaataataaataatcatatcttcatttattattgataataaatctgttgtctcattttaataatttgttatgctctgcgccgggtgcttggatcaatctggttcaagcattgtgccaataccagaaagagaaaagccccggaaaatatactgtatattaaccgaggcggactcaaaaacacacagtttgattctgcctccatttttatcggaacgcaagaggaaatgaaaaagtcgacttttattttagccaatatattagttagaaacaaattaaaaggaataggtattaaattaccaattattaatataaagagctaattatttaacgtcatttttaatacttcactacccgctaataagtatgctccagcgccataatccatattatgctcaaactttacctctcgcggattaaatgccggaagttgtacccaaccaatcatgccattatcatgaatacaggattgtaatgctgaccacgctctatgtaatgcgggaaaatattcttctttatttaattcaccctgatttattccccatgcaagtccataacaaaaaagcgccgtagctgaactttcaggtgcagggaaattatcaggatctaataaactggtgcgccaaaaaccatcttcatgttggtaatctaggatagaacgcgctaattgtttaaacagtgttatataacgatcgcgctcatgataatcatcaggcatatattgaagaatgcgaggaatagaagccaaaacccaaccaataccgcgactccaaaatactttttcaccattagcttcacgcatttcatttccctgaccatcaggaatatagcggtgatcgcggaaaataagtccagtttcagcatcacgtaaatgttcaatagcatcccaataagcggtatgcatataatccaaataacgtcgttcgctaataatttcagccaaagcagcaaaaccaggaggtgccataaaaagagcatcgcaccaccaccagtcttcacgccctggttttggatcatttagcatgatatcaaacgctttaatcgtcggttcaagaatttcagattgttcaaacaaaggacttatcgccaaataagcttgagcgcaaacatgatcatccgcaaaacgtgcattaggacctgttctaaatccagtatgtaaggtgtaatttaacacaccattaaggtactctttatcttgtgtcgcttgccatgccgcacttacacaggtccataaaacaccgcgttcccaatctgtatctttaataaaacgagttttaccactacggcgacgaacactacgaacttgatgagcagattgataacgataaacccgtttcatattttgtaacacgagatctctttgtaaagcctctgtattagcgtgttccatcctagttctccataagattatcgagctaaccaaccaccatcaaccgcaatggtatatccattgatataatcactagctttagaggctaaaaatatggcaggacctgcgacatcttcaggtgttccccaacgccccgcaggaatacgctctaaaatagcagcattacgcgcttcatcagcacgaagtgcagcggtgttatcggttgccatatagccaggagcaattgcatttacattaatattatattgtgataattccgtcgctaatgctcgtgttaatcccattaccgcggatttacttgccgtataagaaggaactcggatacctccttgataagaaagcattgacgcgatgttgattatcttgccaccttcgccttgtttgacaaactggcgagccactttttgcgataagaaaaacagtgtcttttggttaatattaatcacatcatcccaatctttttcactaaattgcaaaagatcttcacggcgaataataccggcattattcactaaaatatcaatacgtcccatcaccttaacagcctcatccactaaagcatctaatccatcttgttggattaaattttgcgtgatgtaatgaaaacgacggcctaacgcttcgactttttgacgcgtttcaggagcatcttgaatacccacgccaacaatatccgcaccggcttgtgctaaacctattgccattccttgccctaagcctgtattacacccagtaacaatggcaactttgcctgttaaatcaaataaattcatgattaaaacctctagaagtgtggcaataattgccacacttttttttgtaggaataaagaataaaatgtaattaattatctgttatttcagatctttcatagcaacatgatccatatcgtggaatacctggttttcacccaccattccccaaataaaggtataagatgcgcttcctacgccagaatgaattgaccaactaggactaatgacagcttgttcgttgcgtaccactaaatgacgagtttcagttggctctcccatataatggaaaaccacattgtcatctttcatatcgaaataaagatatacttccatacgacgttcatgagtatgacatggcattgtgttccacaagctacccggctcaagcactgtcatccccatggataattgacatgttggtaacactgaaggatgtaaaaacttataaatcgtacgaacgttacaattttctgcattacctaacttttcaggtgaggcctgctgttgagtaattttgcgagtaggataagtgtgatgtgctggtgcacagttaatataaaaacgcgccggtgtctctacagaatcactggtgaattcaacagatttggctcccataccaatataaatggcttcacgagggccaatttcaaatacctcaccgtctataataactttacccgcaccaccaatattaatagcccctaattcacgtctttctaagaagaaatcaacaccaagtgctttacccgccattaatgctaaaggttgagttgttgggacaactcccccaacaataatccgatctatatggctataagtgagattcatttccccttcacagaataggttctcaatcaggaactctttacgaagtccttctgtatcaagccttttagcatgttcactatgaattggctgacgaatttccattataaatacctcatttttactgatgggagcataacgaaaaggttatgcattatccccggatacagagtaaatatgatttcctctgatgaatgtatcggtaagatgaaaacactcatccaccacggcaaagctggcttgttgacctgctttgatataacccaatttatcccctatgccgagatattcagcggggatcgccgatgccatttgaactgcttcccactcaggaatatgtgcaagttgcaccatgtttcttaacgcactatcaagactgcaagtgctaccagctagcgacccatcggcagtttttgcctgtccattggtgacggtgaccgtttgagcacctaatgtgtaatcaccatcagctaaacctcccgctcgcatacaatctgtaattagggcaatctgttgatatcctttcatgcgatatgccagttgcatcattacagggtgaacatggataccatcagcaataagttcagctaatacactgtgatataacactgcaccacaacatcccggctcacgatgatgaagcccggtcatgccgttatacagatgcacaccacaatcagcaccgtgtgaaaaagctcgtgaagcttgttcataagttgctgctgtatgtgccacacttggtttaattcctcggctgaccaaccaatcaatcgcattcatcgcaccttcagcttcaggtgcaacagcaacacgcaatagcgatcccccagcactgtcgagtaatgtttctaattcacagatggtcggcgctttgagatatttcacagggtgtgaaccacgatggcgttctgtaaaataagggccttctaaaaagctaccgagtaacaacgcacctgttgcttgaggttttgatacaaactcacggacttgtaatagcgcatgacggatatcctccatcggtgctgtgacagtcgttgcaacccaagccacaacccctgttttaaccagcgcatcggctatagtttgtagtccttgttgcgttgcatccatcacatcagccccttcacgaccatgaatatggatatccacaaaaccgggtaataatgattttccttttaagcgaataactgggcaatctgttggtgcttgtgtggtgattgattcaatattttcaccattaacatggacatagcagagataacggataccttcaggtgtaaaggttctatctgctaaaatggcatatcgctgattcataagccgtcttcttcttcaacatcatgactatctatttgtgccaattgctctcgaatatcttgaatgctgtcttgaccaatttcgcgtagcgtttgcaccaattccgtcgttgaacacccttcccgttcaaatgccgcatttacaatcatgggtaaattaaccccagctaacacctcaacagagggattttgcatcatgattgccattgcgcgattacagggggtaccgccaggtaaatctgttaagaagagatattgctggcatgacatagcgttaatcgcttcacgcattttttgttcaagctcatccggagaaattgactcaataaaatcaataaacgcgatattttcttgctcaccagcaatcgcctttacagcggatgccatacctgtagcaaaattaagatgtcctgagacaataagacctatcatgagtaactccttgcgagtagcagatagctctactacccgtttgtagcaagttaataatgtatttcgattaacagtgtcgacaattagggcatctcttttttataagaatcctaatacatgcccaataacgccaaatgctagggttgaaaaaatcaataccggtggcttaccccaaaaaccggtacttttcaccattttgtacattaagaaaactaagcacagtggcagtaaattcggcataattttgtcgaagagggctgtttgtaattcaacgacttttccgccaagttccagcgaggcggtggtttgcactttgataaaggtcgccgagagcgcaccaataacaaagatccccataatatttgccgctttcgctaatttttcagtggcatcgctcatattgaccattgccgcagtacctgcgcgatagcccataaacatcagtccgaaatacactaaaaaatgcacaatttgatacaagaagaagaaaacgaaaggtcctgcaatcgagccttccattgcaatagaagcacctaatgctaaggtcaaaggcattaaggtcatatggtcgatagcatcgccaatacccccagtcggccccattcctgccactttcatcacattaacagtcgatggcttttctttgttctcttccattgccaccgccgttcctaataaaaaggtaaacagctttggactggcattaaaaaattgcagatggtttttcaacgatgttgcataatcgcgtttattattgccgtgaattttcttcaatgctggaataattgagaaagcaaatccaccaccttgcatacgttcaaagttgaagttaccttccataaataagccacggaatgcacacttccaaagtatgcctttagtaataacttttctgacagcagtatcttgatactcatcaatgccatcaatcaaagaacctgtttctggtttatcctgcgttttcaatgcggtgctgttatcagataccatcttcgaaatcctcattctgctgacttgaatttttattgttaccactaaagaagaagtagagtgcggcggctgatgcgcctaaaatagcgacggccataattgggagtttgagataggttgtcatcacgaaaccaataaagaacacaccggccacttcttttgaccacataatttttagaagcattgcaaaaccaattgcgggtaccattttcgccccaatacctaatccttctaataagacttttggcgtgttctcatcaatccattgagcagcatgttcaccaaaataaacagtaacaaaagcgactaaagcataaaggagtgaacggacaataagtgtaataatcagcaagcgagagatccccgcaccgtcagccttttctgcatatcgatccgctttacccatggtaaatgcagtcatagcaaagaaaccaatcaccaacatctgcattaaaacagcaataggcatacctattcccattgcaacttccggtgattgttttgtcattaccgcaaaagcaactgctgcaatggtgcctaatgtcacatctggtggctgagctccggcattaggtacaagccctaaccatgcaagttctaaggtagcacctgcaattaatcctacttgcatatctcccataatcagaccgacaacgggccctgtaattaatggtcgatggatatttaatgccacgtcgtacttatcgataccgcaaaagaaggcccataaagccactaaagaagcttcaaaaatcataaattatcctcaaacctgcctatagcaggttttcttgatcaggaaataatcaggctgatgcgagtgttagtacatcaacaggagtttgatctggtgtgttttggactgtgcaagtaacccctttttcgataagacgcttaaaagcactaagatctttttcatcgatagagactgttttcgcaatttgacgtttaccttcatgaaaatgcatattgccaacattacaatgagtaataggcacgccaccttcaactaaacgggctacatcagttgggttattacacagaacaaaaattttctgacgaggagatgctttgctaataacatcaatagttttttgaatagagaaaaagcgaaccgcatattcgccgccagcagatgctttcattcccgcctgcataaatgcagcattgggaccttcagcagcatcatcattagcgactaaaattaggtttgcttccgtatgtttaccccatgtaatgcggatttgtccatgaagtaaacgttcatcaatgcgggtccagacaatattaggtgtgttcataactagctctcttattatattttattaatttaaagcagactgtgtgtcttctgttttaagtgagaacggataaattgtgacgccttgtacaactcgattgatttctccggttggagatggattatcaggcgtattccctagtgcaatagaactgtgaaatgcaaatgattgcgccaacatcaaataagggaacaatagcgccacatctgaacagttctctaacgctggaatataaacaaaactctctggtgaaaaagttttatcatttcgtgcggtgatcgcgatcaccttgcctgatgcattatcgtgaataacctctcgtaataaatctgtctcgtattgacgtgtataaggatcattagagaaaaacatcaccacaagggtttctttatttacgatggatttaggcccgtgtcgaaagcctaatggggtatcaaaattggctacgactttacccgccgtcagctctaacatttttaatgcggcttcttgtgctagcccttgtaatcctccgctaccaagataaataacgcgtttgaattttcctgcgtattgatggcggataattttatttgctttgtcaaattgcgctttgtaatcactaaaaaacggcgcaatagcatcagtaaatacactatcgcctaaaaagatagtgaccgccgccatcatcattgaagaaaaacttgatgtcattgctaatgagcgatcgtttgactcttccggcattaataacgccaatgccttatgactattttggcaatattgataaagctggccctgagggttacaggttaaaactaagtggtaacattgcgataagcacttctttgcaatatctaacgcagccacactttcggggctattccctgaacgagcaaaagaaatcagtaatgtagggatatcttcggctaaatattcttgaggatcagcgactaaatccgttgtggcaatagcatcaacacgacgttttatagctcccgtcaaaataggtgctaacgctctaccggcaaacgcggatgttccagctcccgtaagaattattctgctatttgatgcctccaatgctttttctaaaaaagactcaatatcagcacgtttttctcgaattgatagccatgtttttttccagcactctggttgctggtcaatttctttcgctgtccaaaatgcgtttaactgctcaagttcagcggtttgatagcttaaatattccatggtttccctcaattaatggacattgcacgcatcggcataaaccgacaacacatcacgaattttcgcaataacaaatgactcaggcgtacccgcaattttcccctctctaaactgggtaaattgataaggcaaatattggctaagtaagggaagtggaataggcttaacagataaattatccattaatgtgtcaatagcagtattaatctcggcatcaggccaataataacgaatacgatcactaaaactataaacacgagcaaaggcgagttgacgttcatcaccgtgataatatttttgccaaaaattaggctcacggcacatcaattgttccattttttcacgtaatcgagagcacttttcaagaggaaataatgtttcttcaatggcgcaaagagcatataaaccttcacgcatagcaaatgttagcgccggcccaacttttaaaatagcaaagtgatcatggacgagttgctgataagcttgattggtttgataatctgtagagtgagcttcaaaaaccagatgagaatagtcatttactacttggcttaacgcttgtgctttttcagattgataatcaataataccggtatgatcaaattcaaccccaggctgtacaactaaacctataacacgagtccaacactctcccacaccagcgtcataaaatgcttggcgatggcacgctaatgttttacgggcagcatcaggtgaagtcacctcaacggtatcaagctcttcagcagcgccaccaggaacggggacttctgtgccaacaacataaacaatatcactaaaaccaaatgtctttttggcggtattttctgcaataacagcaagacgagctgcacgcgatgccacgatttcatctgttaaaggaataggatcatctgcacaagacatactgcaatcaagatggatttttttaaatcccgcggcaacataatgtgcaataagtacatccgcatttgccatcgcttcttcagcattaagatgctgccagcgattaggccctaaatggtcaccaccaaggataagcttttcgacaggaaaaccgacattttccgctttctcaataacatattggtagaaatcagcgggagtcatacctgtataaccaccaaactgatcaacctgattagaggtggcttcaatcagcagaaaggaatcatcgtccagcgcttgtaataaagcagcttctattactaaagggtgggcagaacaaacagaataaataccattctgtttgcctgatttatgttgctgaacaatcttttctaaaggatgcatgtaaatactaactccataatcaacaccggcggtgttgctaatggagttagcaaattacgctgtcttatcgtccacgatgataacgtcgattttatgatctttcagttcctgaacatactcatcaggaatacccgaatccgtcactaacacatcaatatcaccaaactctctgatcatatgacagctgcgtttaccgaatttcgtagaatctgcaaccgcaataatcgtttctgagatatcacacattaaacggttaagactggcttcctgttcattgtgagtagtgataccaacacgtaaatcaaatccgtcaacaccaagaaaaaccttatcgaaacggtaatttcttagactattttcagcttgtgagccagaaaaagacaatgcactttttcgcaatacaccacctgtcattaaaacttcaacacctgtggtatttgctaactccattgcgacatccagaccgttagtcatgacgactacattttcgcgcgactttaaatgtgtcgcgatttcgcgtgtagttgtccccgagtcaagaatgacggtgtctccatcctttatcagcgttgcggcagctttcccgattaatgttttaatgcccgcattttgtccacgtttttcatggatactcagttcagcaataaagcctgtattaggaattgctgcgccatgagagcgaacgatatagccatttttctcaagaaaacttagatcgctgcggatagtgacacttgagactttaaataattcagcgagatcttcgactctggttttgccctgttggttaaccatatcgaggatttccatacgcctctcaactgccgctttcactttcgtctccttacgaaaccaaaagatttactttcgattgatttcgaatgtagtttactacgccaaatttaaccgacaacgcaaaaaaacaaaacttttgatctctttcacaaagtttcgatttcactgtcgatttcttacgattattttcgtgtcatgtcaatgatagccttgagggcatcagtttccaataaataaaatgatataaggtaatgtcactcttatgattacaccatatatagctatataaaatgccatgaaatagaattaatagcgaaatatttcacaaaaatcagattaaaaattcaaaatgattatttattttcgaaaaataaaagagtcatatcgctcaaataatcaaaagaacacgaaattatcgccatgagaacatcgttaaattgaaaattattgtgttatatacttatcaataaactttcatttactttcgatattctatatttgtgattttaatctcttttgttttgtaaaaatttacgtaatgtaacaggataaaaaataaactcaggaaataaataatggcatcaaatcaacctgctttatttcatatgatggcaaagccgacaagctaccactgtaatattaaatgtgaatattgcttttatctggaaaaagaaaatatttttcaagatgagacaaaagaaacaggccatacagtgatgcctgatggtgtacttcgtcgttatattaaagactatattcagtcacacagtggcgatcaggttgattttgcttggcaaggtggtgaaccaacgctggcaggattagctttctttgaaaaagtggtcaaataccaaaagcaatttgctaacggcaagacaattaccaatagtgtacaaaccaatgcgattgccattaatcgccaatgggcacaattctttgctgataaccactttctattaggcgtttcaattgatggcattgaagccgttcacgataaatatcgtatttcagtcaatggtagcccaacatttgaacgcgtaaaacgcgccatcaatttactaaatgagtatggtgttgaatttaatacattaaccgttgtaaatgatcaaaactggaataaaggaaaagagacttatcaagctttaaaaaatttaggttcaactttttttcaatttattcccatagtcgaagtggatagacgtttcccacacactcatggcggacattatgctcccggtcctaacgcacaattagcggctttctctgttcccgctgaaggttacggaaaatttatgaccgatatattcaatgaatggatacgccaaggtgatgtaggaaaaatatacattcgcttatttgatagcttattagggacatggatgggatatcctgcatcaacatgtattcaatctaaaacttgtggtcaagcattaattattgaagccaatggtgatgtttactcttgtgatcactatgtttatcccgctaataatttaggcaacatacaactaacaagtcttgcacagctcgcaacatcaaaaacacagcaacgctttggtcaaaataaatacgataaacaaaccaacctttgcaaacagtgtgaagtgcaaagcttatgttatggcggttgtcctaaacatcgcattattgcgatagaaggcgaaaaatatcgccacaattatctatgtcactcttataaaaaaatattttatcacacggcaatcggcatgcaattaatgcgtcaagcgatagctcgtggaggccttgccagtgatgcacttggggcgatgcaaaaaaactatctcaagtgactcttattttatttcattttatttattttggagacaatctgtgaccttaccttttgttaaaaaaaacatactcgcggggatcattgccacgtcatgtttaagccttccaatatcagcccatgctggtggcacacctgaaaaaccgaatgtactgttaatcgtaatggatgatttaggcacaggacaacttgattttgtactggataccttagatgtagatgcgttagctcagcgaccaacacctcctcgttataaaggtgatatcaataaaatgatagaagccgcacgtattgcgatgcctaatgtcagtgatatggcagaaaacggtgcaaaaatgactaatgcatttgtagctcatcccgtttgtggcccttctcgtgcaggtatctttacaggacgctcgcccgccagttttggtacttacagcaatgatgatgccattttaggtataccccaagatatcaaattgttaccttcacttttccaagaaaatggctatgccactgccagcattggtaaatggcataatgcaaaagttatccgtaaaccgaaaataaatgaaaataaacaaacccgtgattatcacgacaatatgatctcaacccctgaagcgggttatgcgcctcatgagcggggctttgattacgcctttagttattatgcatcaggtgttgccttatggaattcgcctgcattttggcgtaatggtgtcaatgttcctgctccgggttacaccacccatctattaacggatgaaacactaaaatttattgatgaacataaagataaacctttttttatcaatctttcttatagcgttccacacataccgttagagcaagcatctcctgctaagtatatggataaatttgatacagggaatgtggaggcagataaatattttgccgccttaaatgcagcagatgaaggtattggacaaatcattgcgaaattaaaagaaaatggtgagctagaaaatacattaatttttttcttatctgataatggtgcagttaatgaatcccccatgcccatgaatgccatggatagaggctttaagggccagatgtttaatggtggagttagagtaccttttattgcttatcaacccggaactattcccgcgggaacaaaaagcgatgcgatgatctccgcacttgatattttgccaaccgcgttacaagtcgctgatattcaaattcctgatagcctgcaagtagaaggtaaaaatattatgccattgcttaaaggtgaaacaacgcgttcgcctcatgcttatctgtattgggcaggccccggcactaagcattatagtgaagaaaaccaagagttttggcatggttatcatcaatggatcacctatcaacgtcaaacgcctccagtaaaccctaacttagagaaactgtctaaaggtgcttgggcagtgcgtgatggtgaatgggcgctctatttttatgatgatggtaaaaatcaaccacagctttttaacgataacaccgatcctggcgaatcaatcgatttggcaaaacaaaatccacaaaaagtggctgaactaaaaaatgcgtattaccagtggatcaaagataaacctaaacctgttatttgggggcaagatcactatcaaatactagtagattcagccaaaccttaaactcaacttccgttttgtttcgcaaggatgcgtcttttttctgagatacgaaaatggttattgaaattgcatctaaaccacggcctaaactgccttatgagcaccctgatgtaaaaatttatcaacgcttatttaaagaaaatataatccggcgattagtcagaaaatcggcttatcaccgtcatgataatgctattgctgatttttttaaggatgagacacactctcttttttcgctctgtgaaagacttactcagtatattacagaagcttttcatcactatcaggtttggggttattcccatgcctattaccccggtagtcctggccaacaaaccgtcagaaccgatgcgctagaaggggtcagtcgagtacttcctttacttgccgcatggacagtaaatagcaaaaaaagcacattactaggtttaaaccagcaaatttaccatttaccctcaatgataaaacaaagctttattcatggaacagatcctcttcataaaggctattggggaaaacttgaaaattacgatcaacgaatttgtgaggcatctgatctcgctcttactctttggatcagccgtgaatgggtttgggatacgttatcttcggagatcaaacagcaaataattaactggtttgaacaagttaatcactgcgaaattgttgataataactggcattttttcccactaaccgtccaatttgttattaaagcactgacaggtaaagataccattgcccattggcgttatgaaagattaaaagaattttatgtcggtgatggatggtttcgtgatggggcaaaaggtaattatgattactacaatgcgtgggggttttattattctctttattggctagcgcaaattgatccacaatttgatcatgattttattactcaatccctgaataattttaatcaacactacctttattttatcaccccaaaaggtattcctttttttggtcgtagtgcctgttatcgtcttgctgtttctgcgccattactcgcaggcgttgatttacaatgcccttttgtcaaagttggagaggctaaacgggcttttgaaagtagcttacgttattttatttctcaaggtgcactcaaaaatggcgctcccactcaagggctatttaatcatgatgctcgtttagttgataattacagtggtccagcaagctctttttggtcattacgggctgtcattatcgctctttattgtgctgatcgtattaatttatggcaagcaccatcacttcctttacctatcgaaaaaaatgactttcgtttcgaaatacccgctatccaagcatcaattatcggggtgaaagcaacacaagaagtcagtgttatttttcgagaggattatacacaacaacaatcacctttaactcgccgtttagaaaaacaaacgcgagtacaaaaaatcacagaaactgtaattggacaatcaagacgccctaaaaacaacctattacgcaaaggagtcaccagttacagttctaaaatgacacatttcttctgacttactttcatttgctttcggtgcgaagggaataaaaatgtgatttagatcttttacctttctatttctttcgtttattattaatcgtaattaaacgaaagatgagaggcaaacatgtatctggtttctactcgtaatatgctcaataaagcacagcatgaaaactatgctgtgcccgcttttaacattcataacttggaaactatccaagtggtaatggaaactgcggctgaaatggcatcacctgtgatcttagcaggcacacctagcacgtttgcttatgctggtagtgattatttaatttcgatttgccagcaagcggctgaacaatatcgcatcccagtagcactacatttagatcatcatgaaaatattcctgatatttgcaataaagtgatttcgggggtgcgatcagccatgatcgatgcttctcattttccttttgaagaaaacattcgcctggttaaagaggtcgtcaatttctgtcattattgggattgcaccgtagaagctgaattaggtcgtcttggtgggcaagaagacgatttaatcgttgatgcgaaagatgcgctatttaccgatcctgattcagcagtacaatttatcaaagccacgggaattgactcattagcagtggcgattggtacagcacatggtatgtataaacatgaaccacatcttgattttgatcgtctacatgccatccgccaaaaaacagagatccctttagtactacatggcgcgtcaggtattcctgatactgatgtacgtcattgtatcgacttaggtatttgcaaagttaacgtagcaaccgaacttaaaattgctttctctaacgcaattaagcagtactttttagataatcctgatgccagtgatcctcgccattatctagtgccaggtaaagcggcgatgaaagcggtggttgcagataaaattcgcgtctgtaaaagtgatgggaaactgtgaaaataaatagaactgtcgccattattggcgaatgtatgatagagctaagtggccaaccttttttgccacaacaacagcgttttgggggcgatacattaaatacagcactgtatttagcgcgcctcattcctacattacatccgcaatatataacaggtttaggcactgataattacagtgccttaatgcaaaaagcatgggaaaaagaggggatcaactgcaagtcagtgatcaccattcccgaaaaacttcccggtttatatgccattgaaattgatacttgtggtgagcgtagcttccattattggcgtagtgatgccgctgcacgttatattgcaacggacaaccgttttgcaacacatctagataccttgcccgacgatagtgttatctatcttagtggtatttcactggccattttaacgccgaaaggaaaagaagcgttaatcacgcaattaatccgccttaaacagcgagggatcaccttaattgtcgattcaaactatcggcctcgtttatgggatctaatacctcatgcgcaagagtggttcgaaaaactatatcgactcagtgatatcgctttagtcaccggagatgatgaacaagctctctggcaacaacccagccttactgagcaaaaaattgtcgaacgccttcatcaatggggcaataaaaacgtcattgttaaactaggagcaaaaggggctttctggtctgatggtgaaaataccggttatatctgccccaaaccgatacagcatgtcatagacactacggcagccggggattcttttaatgctggttttattgctgcatggctacaaaactaccctttgcctacatgttgtttatggggaaatacattagcaggattagttatccaacatcatggcgccattattccccataacatcactgattcattctattcactcatcaaggataaccatgagacagtcaattgttgatacactttcagtactgaaagtgatccccgtgatccaaattaatcgcgccgaagatgcaatttggctgggtgaaatactaacccaaaatcaattacctattgctgaaattacctttcgtactccagcagccgccaaagcaataaagctgatgagagaacactttcctgagcttattctttgtgcgggtaccgtattaacagcgcaacaagctgatatagcaaaagaagcgggtgcaagctttgttatttctcccggttataatccaaaaaccgtcgattattgccttcataatggcattgatattgtgcctggaataaataacccaagccaaattgaagttgctcttgagcggggtttaaccttgctaaaatttttcccagcagaagcttctggtggagtaaaaatgctaaaagcaatggcggcaccttactctcaagttcaatttatgcctactggaggaattagtctaaacaatgttagtgattacctcgctatcgggcaagttatcgcatgtggtggcagttggattgctactactgaggcaattgataatcaagacaaacagactattgctcgcaatattcaaaatatccattcattacttaagaataaaggataaacaaaatgaaacaggttgccgttttattggctgatggttttgaagaaggtgaagcggttgtttttattgatatcatgcgtcgccttgatattcatgtagatgtactttcttgcatggatacactggtgttaaacacctattttaacactaagatcagtgctgattacctattaaccgaaaaattcacacacagttatgacgcagtaatgatgccgggtggtcctaaaggtacagatcgtctatgtgcaaattcactcgtgattgattttattaaacgccatattgcacaagacaaatacatttgtgctctatgctcttccggtgcaaaagtattagcagcacatcatcttcttgaaggtcgttattacagcactggtgataaacttgctgataaatatgatgatggtcattatcttgaccaagatgttgttgttgatgggaaatttatcagtgccaaaggattaggtgttagctttgaatttgcctttacggtagctaaatatttgctcagtgataatgtagaaaaagtagattggcaagctaatcacatttactttaaacattggccgttgtcttaccttgactaaatattaaataactaagccctctttttaaaccgccgttaataacagtgcggtttattagagggctttcatttcttatcaaaaaaaagagttagaaacgatacagactaaatggtttggcatctaatacaggttttttgcctaataataaatctgctgtaatttctgctgatacagggctttctgtcattccccaacctgttgcagtattaataactagacctggatactctttaacatcagagataattgggttttcatctggtgcaatcgccatcgcaccactccactgatcaattaacgttgattctttaaatgctgggaactcttttttcagtttttccagtgaggcatttaattctggcagatcaggcagagcggtcatatcacgatatttttcaaatggcgactcttcattaagatcccaatgtgttgattgcataaaggaattaatcaactgctcatttaacgaaatatgtactgggaaatcaggtaaagccagcagaggtaaatatttatagccgtaagtaaatgattcttttactaccggagcaacaatgacacgaggagaagttgcatacgttccatccgcttgctcacggaagaaaattccgccgggtaaagcaacgtttccacctggcgcatttggtgctgcgctaattaattgctgtgattgataagcaggtaatgttggtacatcaacatttaggttctgcataaataaacgtgaccaaacaccaccggcgacaacaacacgagaggttttaattggtcctttttctgttacaacatcagaaataacaccagcttgcgtttctaaaccacgggctgcacagtttgtgaaaattttgatacccatttttttggcatattctgccatcacaaaagtcgcaacttcaggatcgaagcttcctgagtcttcttcgaaaccagcaattttccaatcagtggtagcgccacgtaaacgctgttttaactcagcgccttcaatcatttttgttctaaatggaatgtctgagccaacatctttgcttttagcatcaatccattttcttacgttttctaaatcttcttcatctaaaggaacttctacacgaccttgtgtacgataagtggtatcaataccaactttagcgttcatttcacgccagcggtgcttcccgaggtgatgtaataagaaggtttcatctggcattttatagctaatagcttgaccatagaatcgagatgattgttcgccggcaatatttcctttttcaacgattgtgacagataagccacgctcagcaaggttaatcgcggtcatgatacctaaaatacccgcaccaattacaacaacatcatcttgtttcggtaatggaccgccagttccctcaacaaaaccatgtctcggcgtaccaggaacaaaacgcccttctcgcgttaacataggtgttaaaatcccagcgcctgcagcaacagcaaccactgtgccaccaagaataaattttcttctacttattgccatttcgaaacaattcctttcatgcagtgaataattatcattatataatcacggcattttattctatttgtaacgcaatagtaaactagttgtgattatttttttggtgaatagtatatgaatgagctaatatattcaaaatgtaagcaattgattcaaggtattaatatttaaggcattattggattaaaataatttttttaataaaaaatttaatattttcattaggtttatataaatcaagttcataataactgatagaaaaataaccattgatacaaaatttttcactaaaaaagctattatcatggcgttttttatcatagcggtgttaatataatttcatctattaacgcactttttgatcaaagaatattcaggcagataaataacgttggaataatgttaatcttttcctctattttagagatgcgtattgatgcttatttcaatagtgtgttgttctttcagactagatatttatataattcaaattgcttaaaaaataacgccctacccatcatcaaaattaattatctattaagtactgctatcccattatttaacaactataaatcaatcggttagcctcaaacacggtgagtaaatgcaaaatcaagtcgcacaatcaatgaaaaacagtatcaaggtatacttggtaaactcatttactcgtgatcattgcggtggcaaccctgccggagtcgtcctcaatcctcccaagctaacgacagaacaaaaaatcgccattgctcaacaagttggattttctgaaacggcatttgtctattcgggtgatgacactgattttaaagtagatttttttactgctgaaggagaagttgatttttgtgggcatgcaacattagcggtttttttcactctgtcatcgcttaagttactcaaacctggcgattatagccaaaaaaccaaggcaggaattttaaccgttaccattaatcacgataatattgtgatggaacaaacgcttcctattacccgtaaggggccttgtgttaacgatgtcgcaaaggcgctgggcattctacctgaagtgatagaaaagacagatttaccaatagagattgtctcaacaggattaaacgatatttttgttcccgtacaatttggctatttagatgccttacagcctgactatcaagctatcgctgctttaagccataaatttgatactatcggctttcatgtctttgaacttagtcatgatcaaaatattactgcccactgccgaaactttgcaccacgctatggcattaacgaagaatcagccacaggtagctcgagcggtgctttagggtgttatcttgttcatcaccttttgccaaacaaaaggcaatttttgttcgaacaaggtagagcaatgcaatgctcttctttaattgacgtatttattgattcgacagcaaaaaacgtcactcgcgttcaagttggtggaaaagcgacattgattggtacaaaaataattgagatctaaaaatactatatttaataagtggcgttgaaccgatgattatttatcatttggcaacgccactattacgaatcaaaacaagttgatagagcaaaacgtcacaatttaacaggtgatagtcactgtgttgctcttaattaaacagtgaaagccgaagcactaaagcaacgagtgtaacaatgagcacagggatagtcatgatgatccctgttttgaaataatatccccatgtgatcgtcatatttttttgtgataaaacatgtagccacaataatgttgccaagctacctattggtgtaatttttggccccaaatcagcaccaatcacattggcataaatcatcgcttgttgaattacccctgtcgcgtcacttccttctatggatagagcaccaattaataccgttggcatattattcattattgatgataaaaaggcggtaataaatcccgtaccaattgttgctatccataaccctttatcagcaaggtaattaagtatttcagaaagataattagttaatcctgcatttcttaaaccataaacaaccaagtacatacctaaagagaaaataacgatttgccacggtgcgccacgcaacacttttttagtattaatcgtacggcctttggctgcaattacccaaagaattaaagcgccaattgccgctattgcactaacaggaatgcctaatggctctaaaataaaaaaaccaatgagcaataacaacaatacaagccaacctgctttaaacgtagtcatatccttaatagctaaagctggctcactcagctttttaacatcatattggttaggaatatctttacggaaaaaccaatgtagcatcacaagcgttgcaacaattcccgcaatatcgactggcaccataattgatgcatattcagtaaatccaatattaaagaagtccgcagaaacgatattcacgaggttcgaaacaatcagcggcaagctcgctgtgtctgcgataaacccagctgccataacaaaggctaatgtcgtacctttgttgaaaccaagtgcaagtaacatcgcaatcacaataggtgttagtatcaatgctgcaccatcattagcaaataaagcagcaaccattgcaccaagtagcacgatataactgaatagtaatcttcctttcccaccaccccacttggcaacatgtaatgccgcccattcaaaaaagccactttcatctaaaagtaggctaataataattactgcaacaaatgtcgctgtggcattccacacaatgttccaaacagtcggaatatcttgaaaactgatcacaccaaaaaggagtgccaatatagcgccggccgttgcactccaaccaatacccaaccctttcggctgccagataaccaaggtgatcgttaaaacaaaaattaatgcagcaacaaacataacaacctcgtttaaaaggtgcattcacacacacctaatcatatatgttttttcgaatatatttagttaaattttttacacagaacaacgatgaccagactcttttttctctaggatcttgagtaaatctgcaactctatttttctctgtggtataagttatatcaatgatacttttcacccacggcagtaatacaggagataatcgataatgaacccatttgccttgcttcgaatcgagcaaaagacccgactctctcagcatagctaagtgtcgagatgtcttgggttgcgataaatttaacgcagtatagatatcacaaacacatagctcaccagatacttttaaaagcaatacgatgtctagtctggtttgatcacctaaaattttaaacagttgtaatggtttcatgtatccccctttacgatctttagcttaaaaatacccccatcaaacacatacgtcaaatcatatatgagttatacattattgtggcataatctcgctatctattatgcctataataaatacttattatcgagttctatttaaatgaattattaatttaattaaatattgataggaagatcatagagttcaaataagaaaatcaaaataagatacgttatttatcataatttcactgccacatccaacctattaaaaataaaaagttcaacttgaattatttaaatgaaacctactattaaaataacatcaaattaagaaagtcttaattagagaaattagaaatatatacttactcattattaattaaataaataaaaggtgtatcatatgtatattagtttgttgtctactttataaaaaggaataattatatgaaaaaaacattactcagtcttgttatgctgactgtaatatcaacgccagtattggctaaaacgcctatcgctaatttgaaaatcaatggtgatatcaaaccaccaacttgtactattaatggcgcaacacaaagtgatgttatttttgatttaggtaaaattagtccatcgttgatccctaaatcatcaaattatatatatcctcataatacaacctcgactaacgtcactattgaatgcgatgcaaacacttatcttacatttaaagccactgatacttatgtaaacagtcagcttgatcttgatcaaaccagtaaaactaaagctagtgggatatttcacctggttaataaagaccaggtagacacttccgtggggggaatactattcgtttggtacaatgtgactgtagacggaaaacccgcatttattagccgggcaaatgatgcaacggtaggtttttcagataataaaactgttatagttaaagaagtcactaatggttggacgacaaaacaacaagaaaatgtagataaaaatagtttagatttaatgccaggtcagattttttctaccagcatttcagcagggaaagcatcttctgcatttattttatctaaagattcattaaataaaaaaggtatagatatttctaacggattagattttatcggcgaggctgttctcacttttaactttggtgtctaatttttagaataattgataatcacaatataaagatttattatattgcgattatctttttatactaatatgaatgttatttatgctatcctagctttcttcctcttctttctgtctgcattttttccgctttctgtgcttcttctatctcacgtattctcacgagaatagaaccgtcctctataactgcagagtcgtcccaaataagtgactgtttattaacgtcgagtggcgtttcaatactgttatcaacacagcccaatttagttgacagagaaaagtaaaactacgttatggagaatgtatgcaaagagaaaggagtttccaaaaccacaaaaaacgaaagccggcacatttttaaattagccagagcatgtctatgaagagtgggttagaagtgaaaaatggtaatgctaatttgacccgttacttgacccgcatatctcgcagatttttttaaaaatcgcataaggtgttgattttaaatggtacgccctacaggattcgaacctgtgacctacggcttagaaggccgttgctctatccaactgagctaagggcgcctagaggggaaatagacgttagcatttatgctgataacgggtgtgaattatactttcaacattctgagagtcaacgatttttccacaaaatcaaactagatggttaaaatatggtaagtaatcaactgacagattgcttatgatctgacaaaatagagcaataccataattgaataatttggatgtatagatgtcagcaagaattatagatgggaaaacgattgcgcagaccatcagaagtgaagtggcagaaaaagtaaaacaacgtattaagataggaaaacgtgcaccgggtttagcggttattttagtcggtgataaccctgcatcgcaaatctatgttgctagtaaacgtaaagcttgtgatgaggtaggatttatctctcgctcttacgatctaccggatactacaagtgaagcagatttactcaatctcattgatactctaaatgaagataatactattgatggtattttagtgcagctccctttacctgcgggaattgataacgtcaaagtattagaacgtattcatcctgataaagatgttgatggcttccatccttacaatattggtcggttgtgccaacgtgcacctaagctacgtccttgcacccctcgtggtattgtcacactcttagagcgttgcaatattccaatgaatggcttaaatgcggtaattattggtgcttcaaatattgttggtcgcccaatgagtttagagctactgcttgcaggctgtacaacgactgtcactcatcgttttactaaagacttacgttttcatgttgaacatgctgatttggtggttgtggcagttggtaaacctaactttattcctggtgaatggataaaacctggcgctattgtcattgatgtcggtattaatcgccttgaaaacggtaaagtggttggtgatgttgatttcgcacaagcctctcaacgcgcggggtggatctcccctgttccgggtggtgtaggtccaatgactgtagcgactttgattcaaaatacgttgcaagcctgcgaagaatatcacgatcctgatataggaaataattaatcaatggaaacatttcaattagatggtcacccctatgtagaactgtgtgatctattaaaactccaaggctggacagaaagcggagccgctgcaaaaaatattattgctgaaggcctcgtttgcgttgatggtgaagtagaaacacgtaaacgctgtaaaattactgccggtaaagtcgtcacactcggtgagtttgctgtcactgtcagcaactagttcagctaatcatactcgttactcaagcgttactctttagtaacgctttttttatctttctaccctttttttactaaacacgctatttttcgagcttttatttaagtctgtaaaattagtggactaatccattgattttaaattgatttaattgcatcaatttaagataataatagtaggttattatttttgctattcatatcagtggtaatactttatctcgtttcagcacattaacgctttgataaagaataagttaaatattgattacataacctattattttttatataaataatacttagtctgctagtagtaagaatttcagcaaccttattccgttggatgatttttacgtattaataatcgctttaatatgctaaaacgtgatttagatctaacttttcctttgttttattaggcaaaagaacattgtttatactaaattagacattatagtttgaaacgattcagcctgataataaagtatgaagcgttatttttaatttttatgttgtatttgatccttaatctaataggagttcttatgtttaacctaccaatccaaggtgtctctctgcttttcttgcaacagaaaagtgatacctatgattttactacaggtaaggtacaagcatgagacgtcgagtcgctaccattacattaaatcctgcttatgatcttgtaggattaagtacccctattgaattgggtgaagttaaccgagtaacaacggcgggatttcatgctgccggtaaaggtatcaatgtagcaaaagtattaaaaagccttggtattgatgtcactgttggcggttttttaggtaaagagaatcaagatggctttcaaaaagagtttagtgaagccgggattgctaatcgcttccaaatggttgaaggtcgcacacgtatcaatgtcaaactcactgaacccagcggtaaagtaactgattttaacttttcagggtttgaaatcactaaacaagattggactcgttttgtaaatgacacactcagctgggcgggtcaatttgatatgatttgtgtcagtggaagtgtaccaccaagtattgatttaaatgattttactgcttggatgaagcgactacgtagcgaatgtatgtgccttatttttgatagtagcagagaagcatttgtcgcggggttaaaagcgttaccttggttagtaaaacccaatcatcatgaactagaaatttgggcaggtagacccttacctgaactctctgacgtagtacaagctgcccatgaattacgccagcaaggtattgctcatgttgttatctcgttaggtgaacaaggcgctatgtgggttaacgcctctggtgcgtggatggcaaaaccgcctaaatgtgatgtggtcagcacggtaggtgccggtgactctatggtaggtgggttgatttatggtttgatgatgaggcaaaccagtgaacataccttacgtcttgctacagcaatttcagctcttgccgtcagtcaaactaatgttggaataactgatcgagaacaattggcaagaatgatgaccgaagttgaattaacgccactaaaaatctaaaaaaaatatcggataataattacccgatatttttgactttattgctttatcaataggtagcaatattagctattacgacgccatgttgtaccttgtgggccatcttctaatacaatccccattgctgttaaagcatcacgagcggcatccgcagctgcccaatctttattcttacgagcatcattacgttgttgaattaacgcttcaattttttctacttcatcagcatcgtctgcttgcgcaccactttgtaagaagtgttctggttgttgctctaataggcctaatactttggccaatttacgcaacaccgctgctaaaccattagccgcctccatattgacggtttttaagcgattcacttcgcgggctaaatcaaataacacagaataggcttctggtgtattgaaatcatcgttcattgcttcaataaactgcgcttcaaacgcttcaccaccagcaggttgagcatttgcatcagtgccacgtaaagaagtatataaacgctctaatgcggtacgcgcctgttttaagttctcttcggtataatttagttggctacgatagtgtcctgataataagaaataacgtaccgtttcagcatcgtaataggcaagaacatcacgaatagtaaaaaagttattcagtgatttagacattttttctttgtctaccatcaccataccggaatgcatccaatagttaacataaggaccatcatgagcgcaggttgattgtgcaatttcattttcatgatgcgggaacattaaatctgaaccaccgccatgaatatcaaaatgatgacctaattctttaccattcatggctgaacattcaatatgccagcctggtcgcccttctccccatggtgatgtccaacttggttcaccgggttttgacattttccaaagcacgaaatccataggattgcgttttacgttagcgacttcaacccgagcccctgcttgtagttgctctaaatcttgacgagaaagcaagccataatccggatcggtatcaatggcaaacatcacatcaccattttctgctacataagcatgaccacgtttaattaatgtctcggtaagagcaataatttctgcaatatgatgtgtggctcgtggctctgaatcagggcgtaagatattcaatgcatcaaaatctttatgcatttccgctaacatacgtgtcgttaattgttcgcaagtttcattattttcaatcgcacgcttgatgattttatcatccacatcggtgacattgcgcacataattcacatcataccctaaataacgtaaatagcgggttatggcatcaaatgccacaaatgtacgtccatgaccaatatgacataaatcataaatagtgatgccacacacgtacatacctatttttcctttatggataggtttaaattcttctttttgtcgagtaagagtattaaaaatctttagcatcagaggacgttcccatttttaactgtacgtgttgattacgtatttatgtatataaaataacgactacagcgataaaaataaccacataacattacctttataagggttttaatgcctaaactcaaaggtaatccaattaatagtctcttatattactctgctctgcgtttattttcactgttcaatcgttaacagtaaggcgccaaattgagtttattggtgaaataattggcgaaaaatgttttctattactattttcgcgatttttagcctgaaagtcgccatgaacaaaagatgaatactgactaaataaggtaactgtggtataaaaaaacggtctattgtttcagcccacatctgggtaaaactaaaattatactaggatctgaatatggttacttttcataccaattacggcgatatcgtgattaaaacatttgcagataaagcacctgcaaccgtagaaaattttttagattactgtaaagaagggttctacgataacactatcttccaccgtgttattaatggttttatgatccaaggtggtggttttgaacctggtatgaagcaaaaagaaactaaagccccggtaagaaacgaagcaaacaacggtcttgccaataatcgtggtacattagcgatggctcgtaccaacgatccacattctgcaacagcacaattctttatcaacgtagcagataacgacttcttaaacttccgtgcagaaaatgccaatggttggggatattgtgtatttgctgaagttgttgaaggaatggatgttgtagacaaaatcaaagccgtttctactggtcgcagtggtttccaccaagatgttcctcgtgaagatattatcattaacagtgttactgttagcgaataagtagcgctttttatgtgcaccctgtttattgcagatctgcatttaagtgagcacgaaccggcaattactgccggttttcttcgctttttacaagagcaagcgatccacgcaaatgcactttatattttgggcgatttctttgatttttggattggtgatgatgatcctaatccactacatcagcgcatagcccaagcattaatggcattaaaaaatgcgggagtgccctgctattttattcatggtaaccgcgatttcttaatcggctctcgctttgcaaaagagagcggaatgacactgctaccacaagaaaaagtgcttgagatagagcaacatcgtattttaatcttacatggtgatacgctttgcaccgatgatgatgcctatcaacgctatcgtaaaaaagtccacaataagtttattcaacgcttattcctactccttcctctgaccattcgattacgtattgctaaaaaaatgcgctctcgtagtcaaagtagcaaccaatacaaatctgaagcgataatggacgttaatgctcaagccgttatcaatacctttaaacaatttaatacccaatggatgatccacggtcatactcatcgaccggcgatccacaccgtcgacattgatgggaaaccacattatcgaggtgtattaggagcttggcatacggaaggctcaatgtttaaagtcacctcagataaaatcgaactgatccaatttccattttaaatagatgatactttttcggctattgtagcatatttttctttacgcaaacgttttccttgacgtgttagcgtgatactatcatgctcagtttctctggctatatccgtttatgcttacaggagcagttaagtaatgtcttctcaagttggtctcaatacctcatcccctcgtatcgccattgtgatgggttcgaaaagtgactgggcgacaatgtgtcatgccgcagaagtcctagacacgttacaacttccttaccatgttgaaattgtttccgcacaccgaacaccggataaattatttcgtttcgcagaacaggccaaagagaatggttttgacgtgattattgcgggtgctggcggtgctgcacatttaccggggatgttggcagccaaaaccttagttcctgtattaggggttcctgtacaaagtgctgcattaagtggtgttgatagcctttattctattgtacaaatgccgaaaggtattcccgttggcacactggctattggtaaagcgggggctgctaatgccgcgctacttgccgcacaaattttagcattacactctgctgatatttttaatgcattaacacaatggcgagcaacacaaacacaagaagtccttaatcaccctgatccaagggaggcgctatgaagccggtttgtgttcttggtaatggacagttaggtcgaatgttacgtcaagcgggtgagccattaggtattgcggtatatcccgtagggcttgatgctgaacccgaagcggtaccttatcaaaagagtattattaccgcagaaattgaacgttggccggaaaccgcattaaccaatgagttagagcaccatgctaactttattaaccgagatatttttccattactcgcagatcgcttaccacaaaaacaactccttgatgaacttcatttagcgacggcaccttggcaaccattaacttcggctgagcaatggcctgagctattcaatcagctaggggagtttattatcgttaaacgccgtgttggtggttacgacggacgaggtcaatggcggatacacccaggtgacgaacaacaattaccagccgaaatatatggtgaatgtattgtcgaacaaggtattcctttctctggagaagtctctttagttggtgcaagaaatcgtcagggggattgtgttttttatccactcactcacaatcttcatcaagatggcattttacgcatgagtgttgcgctaccaaatcctcccgaggcattacaacaattagcagaggatatgcttagcaagatcctcaataaactaaattatatcggtgtaatggccatggaatgctttattgtcggtgataaattactgattaatgaactcgcacctcgcgtccacaacagtggtcactggacacaaaatggtgcttctattagccagtttgaacttcacttacgtgctattcttgatttaccgatgcccaaacctaatgtttgccaatcggcggtaatggttaatcttattggaacggagatcgacatcaaatggctatcattacctttagttcatctacattggtatgaaaaagaagtgtgtccagcccgcaaagtagggcatctcaacttagtacataataaccatcaagctctgcaaaagagcttaagtacattaagtcccctgctcgatgaagcctatcaatatccgattaaatgggcgctagaaaaattaagctagcagtccgactcagaaagttagagaataatagcctttaaatgtactggcctgtgaatacaaggccagttattcgctattttttcctgaacattcaggatactgcacccgttctatggagtcaggatgccagtcacgcaacaaaattttggtcctatctatcagtggagcatactgatactgctaggtttagtgtactttctcgctaccgcaacaacatttacctctttaggtgtggttctacctagtatgatagctgaactagagtggaactggacacaagctggccttggttttactttattgggcttaacctgtggacttgcgagctttttacccactttacttatccgtaaattaaacgtccgcttcacactcctcattggactgattatttttgtcagtggattctattttctatatgaaaccaataccatcacacgctactttcttggtaccgccttacttggggtaggttttacgctattagcaaccgtaccgggcacttacgtgctatcgcgtctatttgaaaaacagtcttttgcttttggtgtctattttactattggtggattgggaggagttgcaggcccttggatctattttttagccacacacctttggcacacatggcgtatgcattggctcatttcagctattattctatcaattattaccctgctgactattttagtattacgagaaggctcagcagaaaaagcgcatgcgaaaaaaatcagtcaattacaaagtagcaaacgtatttatcaaaccaaagcgatatggaccgcacgtcatgctttacgaacatggcaattttatgtcattgctgccacttacaccgcttttctatggtgcgggatcacagtaaatagttttgcagttgcacatattattgaaaatggttttagtgaaactattgctgcaacgctactgagcaccatggcttttatcaatgcattctcacgattagccggtggggcgattggtgaatggttagagcctaaaaaattactgattgccagcttaacgattattattatcggtctattagcactgagtatggctaatagttggatctacctaatgctatttaccctttgtgtggggatcggttatggtatgaccttcttagcctcaagtgtattactggctaactattttggtcgcgcaccttatttagaactattttcggtgatgaacctgatctcaacattggcctgtttagcccccttctttgctggggctattaaggatatttcaggcagcttcacacctgcatttttaattctcactatccctgttttagttattttggtgatcacactatttatgcgcccaccaatttatcctaacttccaacatgccagtgaaaaacataatgcgccaagataaaaataaaaccgcaaatctagtttagaaatccaatcaatattatagagaagcggttttagcgaggagagatcgagcagatgaatgaagaattaatcatgaaatactcaattggtatcggcatagctttggcgtgttttatcgcctttcttgccatatcttttttacatgataaacaaaaaaaacgtcgtagaaacataattattcacatcatccaagctattttactttgtagtttagtggctattgtaagccaatactgtgaaatggcggtggtagattttaaactacactttatctcttttcagatgattaatttctttagctatcttgctatcgcattaatcctgatgagaaaatttttcttactcattaatttattagaaaaatcacaaattaaaaaaggcagtgatcctacctcagcccgtattatttcgcgtatatttaaaatcactcttcttgtcatcatgatcttactgttcggtgagcattttggcatgagcttatcgggcttaatgacatttggtggcttaggcggtattgccattggtatggcaagtaaagacgttatgagtaaccttttttcaggtgttatgctctattttgatcgcccttttaacattggtgattgggtacgttcacccgatcgcaatatcgaaggaactgttgttgagattggctggcgtatcacgaagataatgacctttgatcatcgcccgttatatattccaaactcagtattttcctccattagtgttgaaaaccccggcagaatgaccaatcgacgtattgaaacagaattagggttacgctatgaagattcggacaaagttggggttattgtcgaagatatccgcacaatgctacaacaaaacgacaaaatcgacaccaaacagactttattggtctattttaatcaattcgccgattcatcattaaatattatggtgtactgttttaccaaaaccacggtatgggcagaatggttagatgcgcagcaagaagtttatttaaaaatgattgatattgtgcatcaacatggcgctgacttcgccttcccatcacaaactgtatatattgaaaaatcatcgcctgtatcaccataagcatccgataaaaaaatgctgatatccgttcgatatcagcatttttaattcaatatcacgtatcacttcatttaatgataactagataactaatggcgactattctccctgaatacgacgatattggcctttatcttgtaatagcctaacccctaaaatactgccacaaagtgaaagtaatacggcggcaagagcgggaacaactatccacatcatccattgtggttgccatgggaaattaaataccgatttttgcaacaaccctaatgcaacttcagcccctatcgctgcagctaaaccggccattaaccctaataaggcaaactccgcccaaagcgtgcgtcttaatagtgacttactcgcgcctaatgttcgataaaccaccaactcgatacgacgttgtgtcataccgacttgaatttgtgccactaatagcaatgccccacacagcataactaatccaaccataatttctaatgctcggctgacttgctgtaagatctgctgaacttgctgaattaatgcccccgtatctagcacactgaccgtaggaaattgtcgatttaatgcggtgatcaaacttccatcaccattgtaataaaaactgctcatccatttttcaggctgattgcttagcccttcttctgcgaaaataaagaagaaatttggtcgcatattttcccaatcaacatggcgaatgctggtgacaacagatttaaactcgcgagtatcaccaacaaaagttagctcatcccccagctttatttctaacttttgtgcaaccccctgatcgattgaaacgccattaccgacgggaggccatgagccttcgacaataacattatctttaggaagttcactgtgccacgttaaattaagctctcttcgtacggtattattccccgcatcccgtgcatctgcccacactttcgcattgtgatcattaatcgctgttaaacgtgctaacacaaccggataagcatctgtcggtgccacatgataagtggctaataatgtattaatctgctgtacctgaggctttgacatattaatcaagaaatagttaggactatcttcaggtaactgctgttgccatttttccaataaatccccttgcagcaaaaccaatagcgtcaatagcataaaggataatgaaaaagcggctaattgcgtcatggtttggaaaggctggcgtaataaacgtgtcaccgctaaacgggcactcaattgcttaaatttaaattgctttaaaagccataatccaagccaaccaatcacgccgagcaagaaagcaatgacgacgatacctaataaaatagaccacaataaaacacccgttccggcaaacagagttaaagcgccaacaacaatcaatgcaacaatgggtaaataataacgtagtggccaactaggtgccgtagtaccacttctcaacacgcgggaaggttgcgttgacattaattggtgataagggcgtaaacccgtcaataacgcgatgagtagtaaagagccaactgaccatagccatggcataaagctcgcatcaggtaaactttttggtaataccggtgctaaaatctgcaacaatactaattcaaagccccaaccgaccagtgagccgaccacgatagccgcaacaataatcacaccccactgacctataatccatttacgtaatgcatgattatcagcacctaaggtttttaataccgcaattagcgtatgtcgactacggcaataatgtgtcattgaaaccgcaacggcagaaatcgccaatagtagtgttaataatgcagataatagtaaaaagttttttgctctctccattgattgagatagcgcaccattatcttgttttaagctattccaacgctgatccggttttaataagggatcaaagcgttgttggtattcatcaattaatgcttcattacccgcaaacatataacggtaagttaagcggcttcccggctgaacggcaccagtcgcttcaacatcagcaagattaattaaaatacgcggggcaatttgaaaaggattaaaaccactatcaggctcttgaactaatacaccgctaattgtaaaagtggcatcaccgacatcaatattatcaccaaccttgatccccaaaagcgccagtaaccttgcatccactaacgccgtgcctttctccgcttttagccctacaggctgagtttctagctcaccatagagtggatataagttatccgcggcttttaccaacgccaattgaggagtatcaccttctggggcataagacatggtggtaaattgcatttgacgactaagtgttagccccattcttttagcttcagctagccaattttcatcaacaggatacgaggcgcgtagcactaaatcaccggcgataagatcacgactttgagcataaatacttttatcaatgcgatcaccaatacgccctaacgccagcacacaagccaccgccagcgctaaagagagccaaacaattaataaagccggcgagcgccactcacgccaaaaccaacgccagatcatgactcctccttaagttgcccatcaacaagacgtaatcttcgctgacaacgagcggcaagctcattatcgtgggtgaccaaaattaatgttgtggcataatcacgattaagggaaaacagtaaatcggcaattttatctcccgtttttcgatcaagattacctgttggctcatcagcaaacaggatcgccggttgggtacaaaaagctcttgctaatgcaacacgttgttgctcaccaccggaaagttgtgcgggcatatgatacaagcgctcacccaaacccaattgtttaagtaaatcaacggctcgcgtatggctctgtttttctgactcaccttttaataacgcaggaagttgcacattctctaaggcatttaacgttggaattagcataaaagattgaaaaacaaatccgacatgttgtgcacgtaattttgcccgctcttcttcattcattttggtcagatcgtgtcccattaattgcacacgaccagcgcctccatcatctaatcctgcaataatacctaaaagtgtagatttgcccgatcctgactcaccaattaaagcaattgtctgtgcagactcgacaactaactcaacaccctgcaatatagagatctgactatcaccttctcctacttgtttggttaactgatgaacttcaagaaccttttccgtcgacatacttgtttccttatcgtcatgatgatgtttagctttaagtctatcgctgctgatacctttttgatctttggtgacagcctaagtgccggatatcgccttcctattgaaagcgcatgggcgcaacgcctcgcggataagtggaaattaacttatcctgaaataaatgtcgtaaatgcaagcatcagtggcgaaaccgcatttcaaggtcaaaataggctccctgatttattaaaacagcaccaacctcgttgggttttgattgaactgggtgcaaatgatggcttacaaggctaccctgtagcccaaacgaaagaagcgttgcaaaacatcattacccaagtaaaagaagcgggagcaacgccactctttatgcaaattatgatttcgcctaattatggtaaacgctatacgcaatctttttctgcgatttacccacaattggcgaaagacaatgctcttgagcttatcccattttatatggagcaaatagcagataaacctgagtggatgcaaaacgacagcattcacccaaatgaagcggctcagccttttattgctcaatggatggataaaaccctatccccttacctaacacgttaaactattgtgacagtagttaacctagattaaatgagattaattgtaaaattatgcaaaaaacggtattgattacaggaagttctagtgggattggactgtgtgcggcaaaaacactcaagcaaaaaggatatcgagtactggctgcttgtcgcaaagaagatgatcttaaccatatggaaacattggggtttgagcctatttttcttgatctcgatgacgcagaaagtatcgaaaaagccatattagaagtcattcgccttactaatgggcgtttatatggattatttaataatggtggttttggggtttatggtccattaaatgcgattagtcgccagcaaatggaaaaacaattttccactaatttctttggcttacatcagcttactatggggttactgccggcgatgttacctcatggcgaaggacgtattattcagacgagctcggtaatgggattaatatccactcccggccgaggtgcttatgcggcgagtaaatatgccgttgaagcttggtctgatgcattaagaatggaacttgcctctacggggataaaagtcagtttaattgagccgggtccaataaaaacacgctttactgaaaatgttaatcaagcccaacaagataaaccggtaaaaaatccggggattgcgagtcgtttcacattaacacctgatgatgtagtgaaaaaactaatccatgctttagaaagtccaagacctaagttacgttatcctgtgaccttactcacttatgccgtcaaagtgttaaaacgactcctccctgatagacttatggataggatcttaaacggccaaagtaacaaggcttgatttttgtaaaattcatccttatttattaatgaaatagcgtaataaacagcatttatatttaaaactctcaaaaagggataagttaatgttagcaactgcacatattgttgatgtaaatgaatcgaatattcagcaagttatagaacaatcgatgacaaaaccggtcatgatgtacttctattcagagcgtagtcctcattgtgcagagcttggggcaacgttggataaactagcggctgaatttgctgatcagtttgtattagctaaattagattgtgatgttgaacagatgattgcctcgcaatttggtctacgtgcgatcccaactgtttatatattgcaagaaggtcgtcctgtcgatgggttccaaggcccacaacctgaagaagctattcgccaaatccttgccaatatcttacctaaaccagaagaattaaaagcagcgcaagcttcagcactattagcagaaggtaaagcagacgaagcattaccactgttaaaagaagcacaccaaattgatcctaaaaacagtgaaattaccttagccctcgcaggtgctttaatttcattaaataaacataatgaagcagaagaattattagccgcaattccattgcaagatcaagatagctattatcatagtttattagctcaaattgaactgcaaaaacaagctgccgacacacctgaaattcagcaattacaagataattttaatcagcaacctgacaatactgaactcgctattcaactggcgttaaaactgcatgaagtggcacgtaatgatgaagcccttgaattgctatttaattttctgaaaaaagatcttaatgccggtgaaggacaagttaagaaaaccctgatggatattttatctgctttagggactaatgataatctagcatctaaatatcgccgaatggtgtattctttactttattaatattcattttatttattaaagcaggctaaggacagatacatggaaatagttattggtattattatcttattcgccattattttagttttaagtggtgtaaaaaccgttccacaaggttatcagtggactgtcgagcgttttggacgttatacacgtacccttgctccaggccttcaactccttattccatttattgaccgtattggtcgtcgtattaatatgatggaacaagtattagatatcccttctcaggaagtgatttctcgtgataacgccaatgtcagtattgatgcggtctgctttattcaagttatcgatccagtaaaagctgcttatgaggtgaataacctagagcttgcaatcatcaatctaacgctaaccaatatccgtactgtgttaggctctatggaactggatgaaattctttcacaacgtgatcagatcaatagccgtttattactgattgttgatgatgcaactaacccatggggtattaaaattacccgtattgaaattcgtgatgtgcgcccaccacaagagctaatttcagccatgaatgcgcagatgaaagctgagcgtactaagcgtgctgatattctagaagcagaaggtatccgtcaagcggcaatcttaaaagcggaaggtgaaaaacaagggcaaatcttaaaagcagaaggtgaacgtcagtctgctttcttacaagccgaagcccgtgagcgtgcagcagaagcggaagcaaaagcgacgcaaatggtatcagaagctatcgctaaaggggatatgcaagccattaactactttattgcacaaaagtataccgatgccctgtcacaaattggttctgccgataacagcaaagttgtaatgatgccattagaagccagtaacttaatgggtgcaattggtggtatttcagaattattaaataccaaaaaaagtgactcaggtaacaagagcaattaattatgattgaatggattagtgctcagccagcacttttctggctttgtcttggtgtcttactattaatcgccgaaatgctgggcactgcaggctacttactatggtctggtatggccgcattatgtgttgcattaatcgcatggatcttacctattggttggcccattcaaggtattctatttgcattactcaccgttattagtgcaatcctttggcgtatctggcttaaacgcaaaaagttatccaaagaagcagaaaacctaaaccaaaaaagccaccaacttattggtataaaagcagttttgttatcggatactgaaaatggttttagtcgcataaagcttgctgatgggagttggcgagtctattctgacacgccattaaaagcaggtgatacagtcaaagtgattgctattgatggtatcaccttgcacgtcacctcattttctcccaccactcgctcggcatcatcaacacagcatgctgctgttattgatgatgacaacaaccagaaagatgattgatgattgggcattccgccccatcatcgccagggcattcatttgctaataagagaagccgttgacgaatggcatttaattcgttaatggttttctctatctcagccactttctttaaggttgcctctttcacatcagcactgtgacgtgagggattacgtaataacatcagcaatgaacgacactcttctaaactaaacccgacttcacgagcttgctttaacagtgttaattcttcgatatgttgtggtaaatagtatcgatagccattttcaccccgatgaggtggggttatcagatctttttcctcataaaaacggattgcttttgtcgtcaaaccggttttggttgcgatttcactaatattcaaaattcccccttgaccttccccttgcggaaaggtttagcctttatctcagataagaaaaaaccttttcaagaaagcaagttatcccatattacgccataatagaggtaatcgctttttatttggagatattgaccatggcaaaaactacgctactcgcactacaagggctttcatgctcccactgtattaacagtgtaaaaaaatcacttgatgcccgcaatgatatagaacagtccacggtgactattcaatacgctaaaattgacagcgacgcaactgttgaaagcttaatcaaaacaattgaagaagccggatatgaagctcatctagccactcaagctgatgtaaaactaaatttgagtggacttaactgtatgaaatgcgttggtaaaacagaaaatgcgttattagccgttgacggtgttgttgcggtcaatgtagacaaaacatcagctgaaatttttggtacagcaaacgcaaaagatttaattgccgccgttgttgctgaaggttttgaagcctcattagcaaacgaagaagaaaataaaccaaaaacgattgaactgactttatcaggcttaaattgtggtcattgtattaattcagtgaagaaagctcttgaagggactgatggggtagaaagtgcacaagtggaattaactcatgccacagtaacaggtacggcaaacacagagcgtgtgatcacagccattcaagatgctggttatgatgcaaaattagcaggagccaaccacccaaaaactgagccgctgacgcaaacggatgcaccactggaagcatcgtcagcggcgatttgtgatattccagtagaagaagccatccttgataataataatgctgatatcagtatcgatgatgatagcactcagctattaatcgacggtatgacttgtgcaagctgtgttagcaaagtacaaaaagccttacaaagtgtttccggtgttgaaaatgcacgtgttaatttggctgaacgtagcgcacttgtaaccggtcatgttaatcatgatgacctgattaatgcggtcgaaaaagcaggctatggggcagaaattattcaagatgatgtaaaacgtagagagcgtcaacaagaagtcgctgttgctaatatgaagcgttttcgctggcaagcagccttagccttagtcgttggtattcctgtaatggtatggggaatgatcggcgataatatgatgttaacggaagctaatcataatatctggttaactatcggtattattacgcttattgtgatgatagctgcaggtgggcacttttatcgtaatgcgtggcaaagcctaaaaaacggcagtgccaccatggacacgctcgttgcgttaggtacaggggcggcttggctctattcaattagtgttaacttatggcctgaggtgtttcctgcccaagcaagacatctctattacgaggccagtgcgatgatcattggtttgataaaccttggtcatatgcttgaacaaagagcccgtcagcgctcttctaaagcattagagcgtctattagacttaacaccaccaacagcaagagtagtaacagataatggcgaagttgaaatgccattagcggatgtgaaacaaggtatgatcttgcgtttagcaaccggtgataaagttcccgttgatggtgaaatcacccaaggtgaagtgtggatggatgaggcaatgttaactggtgagcctattccacaacaaaaaagccttggtgataccattcatgcaggtactaccgtgcaagatggctcagtgctgtttaaagctgcagcagtaggcagtcaaactacccttgcccgaattatcaaactggtacgtcaagcacaaagcagtaaacccgaaataggtcaattagcagataaaatttccagtgtatttgttcctatcgtcgtcgttattgcgttaattgcaggggctatttggtacttttttggtccttcaccacaaattacttatgcactcgtcattatcacaacggtattaattatcgcttgtccttgtgctctaggattagcgacccccatgtcgattatttcaggtgtgggacgtgccgcagaatatggcgtattagtgcgtgatgcggatgcattacaacaagcaagccaattagataccttagtttttgataaaacaggtaccttaactgaaggcatgccacaagtaactgagatccacacattcaatcagataagtgaaactcaagcgctagcattagcaggcgcactagaaagtggctctaatcatccattagcaaaagcgattttaaccaaagctgaaggtattaaattaccgcaaataagccaatttagaactcttgcaggtatggggttaagtggtgaaattgacggcaatattgtgctgttaggtaaacctaaactaatgaaagaatctggcattgatataagtgagataaacgccttaatagaaaaccaatcagcgaaaggggtaacccctgtcttattggcgcaaaatgggaaaatagcggccctactttctattcgtgacccactgcgagaagataccgttagtgcattacagcgtctacatcatcaaggttatcgtttggtcatgttaactggagataaccctattacggctaatgcgatagctaaagaagcgggtattgatcaagtgattgcaggcgttatgccagaaggtaaagcgcaagcgattagtcaactacaggcagaaggtcgtcgcgtagcaatgattggagatggtattaacgatgccccagcactggctaaagcagacgttggtattgcgatgggtggtggcagtgatatcgccattgaaaccgcggccattaccttaatgcgccatagcttacatggtgttgctgatgcggttgagatctcaaaaggcacactgcgcaatatgaaacaaaacttgtttggtgcatttatatataacagtttaggcattcctattgctgccggtatcttatatccttttaccggtacattattaaaccctgtggttgcgggggctgccatggccttatcatcaatcactgtcgtcagtaatgccaaccgattattacgttttaaaccgaaaaaatagtcgcaattaatcagtcaaatacagcctcttctatctttagataccagaggcttttttattatccagagagaattatcatcatttcaataagttaaaaaaaagccgatattgctatcggccagtcaaagaggaatttttcattatacaagagagtcatcactccgccctcttaacgatagaatagcaatttattatcaataattcattatattttattatttataaatatattcattaataaaaattaaaaggcgttttatttatagtgattaaaaaaacattttataaaataagccacttatttttatactttatatttttataaggactttttaatgaattataataaattatttcttatttctttctctttaatttattctgcaaatgttttttctaatactgatagcccattaccaacagataatccttcacaattaggaaatggttctatggtagaatcaaatataggtattccctcaacatcaacaactcatctaccacaaccaccattaatgggtaatcgcgcaccagtaattagcccaagcccattgccaacaggtaatacttcacaattaggaaatggttctatggtagaatcaagtgtaggttcagaaacagaaccaacgactcatctgccacaaccaccattaatgcctcatctaccacaaccaccattaatgggttatggcgcaccaacaataggtaatacatcaggatataggacacaatttccaaatacagatgctaatccaattaaaacaattaaagcaattaaagaaattaacacataccttgacatgactgaccctgcaaccaattatcatagtaaattgataggtgaatacatttcagcctttatttctatttctagaccttctacatctacatcatctgaaaatactgtagtcagcctttctaaacctttttttgatcgtatgtctaaagcaatagatgttgattctgatgaagatggaagtatgttagtggataaaagtaaaaaggatatcgctcgtactatgtcttcttatttagaaaatctagaagcagactttttagaaacaatgaacgatgaaaatactagtgaggatgaaaatactagtgagataagactaacacagatggcattattacatcagatacaagattttaaaaatattgttgacgaaagtatagaaaaaggtacctcttttactattgttgcaaatcaagatctagaaacagcagaaccattaactgaaatccaaatgattactaagcgattatcgcaaccagtaacacgagttgatattgctaatgcatatgttttattatcaggaaaaatagataatgaagttggagctatagcgaatcaacaacaaataactactgaaacgttaactttacaggataataaaattactaaagtagaaagtgatgtgaaaaaaaatgaaggtaatatagctgttaatagagaaggtattactaaagtagaaagtattgtagaaaaaaataaagaagatatacaaacaaataaagaagatatacaaacaaatagagaaaatattaatcaagttaaacaaactgctgacgaaaataaaaaatatgtaaagcaatacctagctaatgatttcgatgttaatgaacaatctaaaagtttagtaggtcatcttggctctttatatgcaggaaataagttaaacacagataatattaatgccattagaaatgatcttagccattttaaaaatgaaaccaataatcgtttctataaagttgaaaagcgcgctaatcaagggattgcctctgttgcagcgatgagtaatttaccctttaatgatgcagcaacctttagcaccgcaatgggtatcggtaattatcgtaatgccacagcatttgcatggggaatgcaataccgtatcaacgaaaatgttaaagttaaagcttcaaccgcttggaatgacgctaacaattgggtctctgcgggggggatcggtattagttggtaatataaatttataaatatagcggtaaagataaggaaagctaagtaaaactcagttttccttgttttattcaatacaaaatccgttatgctacaaccttgtggtttatcccatgaggagcgtatcaaatgaaggatataatacagaaaatcaagaaatggatcggtatacagaatacatctgattacccctatcctgctattgatatttcactccctaatcatgtctctttacatcttgttggtagtatccatatgggcgtgccaacgatgtcaccattatctaatgtgctgattaataaaatagcaacagcggatgcggttattgtcgaagctgatatttcaaccgaaactcagccctttgatcaactatcgttattgcgagagccattagaacaacgagtaaatgaaacacaacttgccactatcatcagccattgtgatcttctttctattccacgttaccaaattgatgataaaccactgtggcaaatcgcgctgatattacaatcaacccaagcgatgcaacttggattacaaccacagcacggcattgattatcaagttatccaacaagccaataaacaacaaaaagcgattatagagctagaaggtattgagcgtcaggtcgcattattattagattttccacaagatggcgcacaattactcgaagatacgctaaaaaattggcatgaaaatgcacgggcattgcaaattatgatcaattggtggttaaattataccagtgaaaagcacccttctcctttgccaaatacttttagcaaagcggtatttgatattttaatggaaaagcgcaatcaagtctgggcaacaacgctttctaatcttccagcaggccactatgttgtcaccgtcggtgctcttcacttatttggtgaagataatttagttgatcgattaacttatcaagcataacaagatcacgttcaccattgctctcaccttattgagtaggaataattatgactcccgcagtgaatttactggaaaaacaaaaaattaaatttactcttcacccttatgaacatgatgcgaatgtacataactttggtgatgaagccgttgaaaagttagggctagataaccgtcaagtgtttaaaacgcttctcgttgcgttaaatggtgatgctaaaaacctagccgttgcggtcaccccagtatcaagtcaacttgacttaaaacgagtcgccaaatgccttaaagctaaaaaagcagaaatggccgatccacaaatagcacaaaaagtaacaggttatttagtcggcggtataagcccattaggacaaaaaaagcgccttcccacggtgattgatgatcaagcacttaagtttgacactatctatgtctcaggaggtaagcgagggctggatattgaactaacggctgaagatttatgttcagtattaggtgcacaatttgccctgatccgtaaagaggattaagagtaacagattgcttattttaggcttttatatcaaccaagctgccaataagaaataaaataacaaaaggcgacatcctctgccgccttttgggaattatctattgtatattttcaataaatactattttttatacacaatctcgccttgcggttcaaaatcagccgcttttagtggtgagtgtttttcgatataaccttttaacacttctgcatcaacaaaaccggtattgacatatcctgggtgtgaatcaatcttaggataaccatcaccaccaataccgttaaagtttaatgtcgccatacgataatttttagttttatctaatggtttgcccgcaatttttacatcactcactttacaatctgcatctacggttaaacttacattgtaaaattgtgcataagcgcctgagtctactttcatgcaagcaactgcggataggtaaggttcaacttcttcacctttgaaatcaacatagacgagttcgttagcaaagggttgtacttttaatacatctttataagtaatatcgccagattcaatcgaatcacgtacaccaccaccactcataatggcaaaatcagcatttgcacgctccgcctgagcagataacagtaaacgcgccatattcgtttgttcaaaacgaactttgctacgatcgccttctaatttaccaacaacttcccccactttcacattcaattgctcaccacctttctcttgataaggggtcagtaatttcatcatttcagggttatgagggatctcctctgtgtagtaaactcgctcagtggttccgtcttcttttttcactttcttatttaagttaattggaattaactgatagtgttttaatgtgaactcaccattacggaactcaaaatcagcgcgacctacatatttaccccattcatgggcttgaacaatccatgtgccattttgattatctggagcgcaaggcgtgccgggaacataatctgcttgtttgtaatttttattctcttgagacatacacaccggatcttgtgagtgtccaccaacaatcatatctaaatagcctttcggcaaagcacgcgccatttcaacatcacccggtgcattagagccatgattaccatcgtcataatgccccatatgggtagcagcgataataatatcgggtttttctgtggtacgtaattcttcaacgacttttttcgcttcatctgccggtttacggaactcagtatcagggaagttagcaggattaccaatacgcacagtatcatcggtagttaaacctaataccgcgattttcactccttgtttatcaaaaatagtataaggtttaaataaacgttcaccggtacttttttgataaatattcgcagaaaggaaagggaaagtagcccatttttcttgttggcgtagcacttcgagtggattatcaaactcatgattacccagcgccatagcgtcataaccgacaagattcatccctttaaaatcaggctctgcatcttgtaaatcagattcaggaacccccgtattaatatcaccaccagacagaagcaatacgctaccgccatttttagcgacttcatcgcgaatattgtcaacgacggttttttgagcagctaaaccgtactcaccatgatcattgtgccaaaagtgaccgtggtgatcattagtatgtaggatggtaatttggtaagttttatctttttcccatgcctgagacatcacaggcgccattgctaaagtcactgtcagtgcgcatgcagataatttaaacgataagctcatggtctatccccatgtatattatttattgagaaggctctgccctgtattcacagtagaaaaagcagaaagaagtaaatagttttactgtgttttatgacgtaggttatatatttttattattatttcattgttccaatagtttttttgagacatcagtcaaactctatttgctttgacatcctccacgccctaaaggacgtggatccctactgcgttcagactgatgtctgaatcacctcggcgagttcctgcttcgacgggcggtctgactgcaccctcccttcacaggcaagcacggcatgtcctgccgctaaaatgttacgtgccccgttgatatcagcattcgctgtatatccacattcaaggcactcgaattgactttgtgactggcggttttcctttgctgtatgaccacagcaagcgcacttctgactggtgtaggtattgccagtacctgaccacctcgccagagctgcttgtactcaagctgacggcgcatttcataccagccctgctccagtattgagcggtttaaaccagatttagcttttacgttccgtccatgccgttctgtcgtaccttttgccgatttagacatgttactgacctttaagtcctcaatgacaatcattgcgtggtttttgctgatttcgctggtgactttgtgaagggagtctttcctgatattggcaatatgagaatgcagacgttgaattttgcgcttttgtttttgccagttggcactgaatttgattttacggcttaatttccgttgaagccttgccagctttcgctggtttactttaaaactgctgacgggcgggtataccgtaccgtctgaaagcgtggccagttttgtaacgcctgcatcaagcccgactattgaggttgattcaggttgtggttctgtcgcttcatactcagtctgaatgctgacgtaccatttaccgcatgactgactgaccgtgacgtttctcacttctccgacgacttcacgactgttgcggtagcgcatccatcccaactttggcaatgatatacgactattggattgatccagcttcacgccctgcgggtagcgaaaagcgtcatttttaccgcgtttcttgaatcgaggaaaagcggtacgcttctggaaaaaattcttgtaagcccgttccaaatctttaagtgactgttgtaatggttgtgatggggcttccttcaaccattgtgtctctgtgtcagatttccactcgatgagccatgaagccatttttgtatagggaatgtatttattccctgcttcgtgattcttattctgacgtgctaatgcccgattgaaaacaaaacgacaagcccctgcaaagcgtctcatctcacgctcttgctgaccattgggtcttaactggaatttaaaggcttgtagacgtttcatattacctattatactttggtctatgaaaaatgaaactaatattcgccgtggcagacattgtgtattcctgatgccgtccatttggtctttgtcacaaaataccggcgaaaaatatttgatcaggatgcaattgaaaaattgcgaggctactttgccagtgtttgtgctgattttgatgttgaactggttgaaatagatggggaacgggatcacgttcatttactgattaattacccgccaaaactggcgatatctaatctggttaacagccttaaaggggtatcgagccgattacttcgacgtgatcgtcctgatattgcccaacgttattactacaagggggttctttggtcgccgagttatttcgcggggagttgtggtggcgcagcaatatccattatccgccagtacattgagcaacaggaaacaccgagttagttaaaaaaccgcgccttatatccccgacctgaaggacggggttttacggtgctttggataacaatagcaataacttactaacaaaaaagcatacattaagttgtgataacaaatttttggctatttttactccattataggtaagaacgactataatttaacttaaaaaataaatttcagttatgaacatctcggggacaatgttgcccgttcccctatcgcaaaaacaaagtctgcttattgatattatgttaatcacagcattttctactgtgtagcatagtgctcaatagttattcactactgaaataaccatagttagcattttttattttatctgagttttacttgggtcaatatgagggatactcgtcttagcgattgctctctaatttaaaaaaacattgaacatgttgagcctaatgacacttatctatctttattgattatttccatactttttcttcaccagatcctgaccaataaagctaaataagttgtatttatttttacaacctacaaccaatctaaatagtctatatcaagcttatacaaagaagatctaccaaaataacacagaaacactcagttacattataaaactaaatcaaattgctattttcataaaaattcaataaattttagcgaaattatcgcttagatacgttaaactaaccgtctgctgtaccactcgccccccgatacatgtagtttaataacaagaaggagaattgatgccgcattcaaccccactcattaccaccattgttggtggcttagcacttgcttacatcttaggcatgattgctcaacggctaaaaatctcacctttagtaggatatcttgctgcgggtgtgctcgctggcccatttacccccggcttcgttgctgatacctctttggcgcctgagcttgctgaaatcggtgttatcttactgatgtttggcgtaggtttacatttttctttaaaagacctaatggctgtaaaagctatcgcgatccccggtgccatagcacaaattaccgttgccaccttattagggttagggttatccactttctttggctggggtctatttagtggcattgtctttggattatgcctttcaacggcaagtactgtggtattgctacgcgcactcgaagaaagaggtttaattgatagccagcgcggtcaaatcgctattggttggttaattgtcgaagatctcgctatggtattagccttagtactactaccagctattgccaatatgcttgaaagtagtgaccaaacaagtatttcacagttattaattaacttaggtatcactattggtaaagtagttgcctttattttaattatgatgattgtcggtcgtaagcttattccgtggatcttagctaaaacggctgccactggctctcgtgagctttttaccctatgtgtgttagcactagctttaggtatcgcttacgcagcagtgacgctatttgatgcctctttcgcattaggcgctttctttgccggtatggtacttaatgagtctgacctcagccaccgagcagcacaagatactttacctctacgtgatgccttcgccgttctgttctttgtctctgtcggcatgctatttgatcctatggtattaattgagcatcctctaggcattttagccacacttgcgatcattattataggtaaatccttagcagccctagtgctcgttcgtatgtttgggcattcacgcagaaccgcattaaccatttcagccagtcttgcgcaaattggtgaatttgcctttattttagctggaatgggggttgcactaaatgttttagagccagatgcacgtaacttggttcttgccggcgccttagtctctattatgcttaatcctgttctcttctctttgttagaccgttatctagcaaaaacagaaaccaaagaagagcaagagcaacttcaacaagaagagatggaagaagagatgcctgtgcctgtcgatatttgtgggcatgccattatcgtcggttatggtcgtgcaggtagtatgctagctgaaaagctacaaccacaagctatcccattggtcattattgaaaatagccgtaataaatttgctgagttaaaagaaaaaggcttaaacgccgtactcggtaatgctatgaccaaagaatcgctggcattagcgcgtgttgattgtgctaaatcgctactactaactattcctaacggttatgaagcagcagatatcgcagaaacggcaagaaaaatgaaccctgatctcaatattatcgttcgtgctcattttgacgatattattgttcgtgctaactatgatgaagaagcttcctttattcttgagaaaggggcaaatcatgtgataatcgatgaagatcagaccgcttcagcaatggctgagatgctaatacaagaagtcgagttcggttgcgccattgatgacacacctgaagagggtcaacaaattattgcgcccaatgcagcgcaataatagagatttatttttaaaataaaggattaacaaactaaaaaagcaacacctttatcgcgtgttgctttttattttctctctttcacaaaagaagagcgcgacgacttaacttaacgttcccagtaagcttcttctaagctatcttctttttcaggcaaaccgcgagtcaaacgtggtgagtgttgacttaatacttgatagcttacacggttagcatatttacacacttgcgccaatgaagagtaagtcaaataactacgtgggtgtttactcgaattaggtacattaatgcgatgataactatttgccgtaatatcatgtaatagtgcagataatgccgcatcgccagcaccattggtattcatgattttttccggccctcccatataaggctctatatgcgaatagactttttccggcgtttggcaatctttaaaacgcatagcacggctaaactcgtaacgattaaattcagcaattgcacctggaagtaacggatgagtggtttggcgtttaaaatcactctctgtaaaacctgccatatacaaccctgcagggcctgcggtacataagactaaatcaacccactctaaagccgcatctgatgctaacaatggatcagcatgacctgtaagctctagggcttcatcttcattcattgccactacagagacatgctcttttaagaaatctctccaccactgaggatcgtcggcaatcacgtatttagtacctaatgttaagacaaccggtacatcatgctttttggcatattctatcgctttcatagttgccaacggcattggctctcccggtttgcaacggacgagataagcagttaaaactaatgccgatgcatctgcaatcacatcctcaggaatactttcgggctgaagttgattcatttgaccaggactgatagcaaaagtacgttcaccattttcagtaatgagggtaaagcaacgccctattgcaccatcaacaccttgtaaatagtttaaatcagtacggcttgaggtattacataagtagcgataagcataactaccaatctgaatattgttgcacatagtccccaataaaacagaacgatcatccgctaatacggagtagttatgtagtgtgttaccaatagtgccacccgcaaattcatgggtaataagattattaaccgttaattcgcgataaagggcttccgctacatcatcttcaataaccagagagtgtccctgactcaagttatagcgattgataaacgcttcatctaccttagcttcaatatcaactaatgtttggtcgatgccaacaatataagcccgagaagattcgctctcagtcatattgatgataggttttaataatggatctcgtaaactaacgggaaaatagtgtttggattttcttttgccagggaatttcattgtgaacgatgctacaagctaaaaaagatgcgcaatgttaacacaatattagtggagagacagtaggtgtacgtctgtacacctacttttatttgtggatatttacgctgttttacggcgatttcttgccatatagcccagtaaaacacccattacagaaaggataaaaccaacaaatgcggcaccgactaagattaatgcacgtttaggcgcatctttcttagttggttcataaggttttagcatatatttgaaaggaacaaattgcagatcacccaattttatttgttctaactgctggatattatataagcggttttttaattcagaactgaccgttgtaggatcagtaatcgcttctgttatcgctaatttactactaagtgcatcagcccccatggcaatggagtaatcaggatcatctttaatttgtgcgccttcactagaaataggctttttaactcccgcagcattggcaatttctagtgcatattttaagcgctgaacattaacattacgcgcattagcaatacgttctaaatccatttgatacgctttttgcgcatggtttaatttacgctcaatttgatcatcaatttcgtctttcacttctacccgtactttagtagaaataaagcgaatataacctgacagcaaatcgtaagcttcttcagaagttggcgcagtaaagcttaagttaatttcgccactaaattcttcatcactatttttactgtctgatgcttttaaattaatatctttagtaacaatagtttcgattaatttacgtttatccaatggcgtaggatcgtccatcttagccaataagtttttatagtaatccgtattgactaaatattcttcacgtaatacacgggaattgtagttattgataaatttttggtaaacagaagaagcatttacgccagtatcaacatcaaccaagcttaaatcatttaaggtagctcttaactgcttcatctcatctaacattggttttgtaatagcagcttggcttgtccatttctggggcagaaagctcgcaacagtaaaacctacgatagcaaataaaagtgtgatcccaataatgacaaattttgatttataaagaacagaaaataactcaaacagatcgatttcatcgttctgttttagataaaaatcgtcgaaatgccctttatcaacttctgaagattgtggttttgaaagcttactattcattttcctgcctaaatttgtgtaatgcagcgtccgtttatcagccattttagtgcacaagactaaaatggttaaaaaatgagaaaagataagtttatatataactgaaatatgatcaaatgaatatatcacctaatccgataatcgtatttagtgagcttatctattatttttcacatatgtcgcggattatagcttcaagtaagtcaatatgctcaactttatcattcaaagcaggaatgtattcatactgttttccaccaccatgtataaagaactcacggttctgttcattaatttcttctaatgtttctaaacagtctgatgaaaatccgggacaaataacctgtacatgttcaaccccttcactacccagtttttccatcgttttatcagtataaggtgataaccaaggctcacggccaaaacgtgactggaaagtcatcatcactttttctgctggataatcaagttgctgttttaatttttctactgtaaggcagcattcatcaaaatagatatccccagttttaataaatcgttctggaatgccatgaaatgaaagtactaaacgatccggcttaccatgttgcttgaaactctcgtcaatgctatttaccagcgctttaatataaagtggatgttgagcataactacgaacaaaatgcagtgaaggaatagttcgcatcgttttaaacagttggctaataccatcaaataccgcccccgatgtcgaacaagagtattgaggataaagaggtaatacaattaacttttcaacgccctgcgccaataatcgcgtcagtccttcgttgagggaaggattgccgtaacacatacctagttcaacaggtatatgcgcaaaacgttgtgctaacgctttttgctgtgcacggctatagactaaaagaggagagccgtctggcaaccaaatttgttggtataatttggccactttaggtgagcgaaatggcaaaataaccccatgaagaatgggtttccaaatccacggggaaacatcaacaacgcgaggatcgctaagaaactgagctaaatagcgcttcactgcatctggttgaggtgcatcaggggtgccaagattgaccaaaagaacgccgtatttagcatcattcataccaagactccttagagctgttttattaacataaccaaaagtaaaagagtaaaggaaaatagtgaactctgtttgtcaattaatcggattgtattctttttataaatattttgtaaaaaaaatcccggtctaaccgggattgctcttcggtgttatagattaaccgaggatgtttttcagttcagcattaatttcgcttactttctgtgtaccatcaattttgtggtactgcgcgttacccgctttagcttcattttggtaataagaaactaaaggtgctgtttgagaatgatattcgattaaacgtttacgcactgtttcttcttggtcatctttacgagttgttaactcttcacctgtcacatcgtcacggttttcaactttaggtggattaaatttaatgtgataaacacgacctgatggcgcgtgcactcgacgaccaacaatacgttcaacaataatttcatcaggtacagcaaattccagtacgaaatcaacattgatacccgcttctttcattgcatcagcttgtggaattgttcttgggaacccatccaacaagaaaccattacggcaatcgtcttgtttgatacgctctttcactaatgctattactaattcatcagtcactaattgaccgttatccatcaatgcttttgctttcagtcctaattccgtgcctgcgctaaccgcagcacgtaacatatcaccggttgaaatctgtgggataccatagttttctttaatgaattgagcctgagtgcctttaccagcgcctggagcgcctagtagaatgatacgcatcgcgtaaatccccttgcatttaattttttatagttaaactcgaaaacgcattaccataccattttgtgaggtcatcgctcaagaaatcacgttatcgattgcactttatttttatcgcaaaagaaaaaaaccacgctctcttgcgcaaagaacgtggtttaaatgattgaaaacgaatatggttacgcgtttttagctaatagttggttcactaaacgaataaactggtttggatcttctaaagttcctctttcagcaaatagcgcttgatcgagtaataaattgatccaatccgcgaactgtgtttcatcagtcaactcagccgtttgtttgactaatggatgattagggtttaactcaaagttgtatttaacttcggggacttgttgacctgcagccgcaaaaagttttgccatttgcgtactcatttcatccgcaccagtagtaacaatagcaggcgtgtccgttaaacgatgagttaatttcacctctttaactttatcacctagtaaggtttttacacgctcaacaaaaggtgccagttgtttatctgtctcctcctgctgcgcttgtttctcttcatcagccagtttatctaaagattcatctgctttgctcacagattggaatgatttaccatcgaattcagtgagatagttcatcatccactcatcaatgcgatcggatagcagtagaacttcaataccttttttacggaataattctagatgagggctatttttggccgcagcatagctatctgcagtgatgtaatagattttatcctgaccttcaaccatacgactcacgtaatctgccaatgaaacagtttgtgcatcgctgtcattatgagtagaagcaaagcgcagtaatttagcaatggcttcaatattagcgtgatcttctgcaggaccttcttttaacactaaaccgaactctttccagaaagtttgatactcttcaggattattgtcagccagtttctgtaacatttgtaatgcacgtttagttaatgcgctacgtaaattacgtgtcacagagctatcttgtaagatctcacgagaaacgttcaacggtaaatcgttagaatcgactaatccgcggataaaacgcaaatagttaggcataaactgttcagcttcgtccataataaagacgcgctgtacatacagttttaaaccatgttgatgttcacggttccataaatcccaaggtgctttagaaggaacatacagcaggctggtgtactcttgtttaccttcaacccggttatgtgcccagcacagcggatcagcaaaatcatgagaaagatgcttataaaattctttatattcatcatcactgatttctgacttattacgcgtccataacgcttgagctttatttattttttcccatgtaacggtgccgtcttcttcatttttagtttctatttcgacaggtagggaaatatgatcagagtatttgctgataatactacgcagacgccaatcatctaaatattcgtcttcaccttcacgtagatgcagggtaatttcggtaccacgatccgctttttcaatatcagcaaccgtataatcaccttcaccttgtgactcccagaaaacacctttatcagcaggttgccccgcggcacgggtacgtaccgtcactttgtctgccacaataaatgcggaataaaaaccgacaccaaactgaccaattaattggctatctttcgcttggtcttgtccaatagactctaaaaatgctttagtccctgatttcgcaatagtccctaaattatcaatcacttcatcgcgggtcatacctatgccgttatcactgatagtcagtgttcttttttctttatcagtggcaatgcggacatgaagttcaccctcattttcataaagagctgcatcggataatgcacgaaaacgtaacttatccgccgcatccgatgcattagaaatcaattcgcgaaggaaaatttctttattagagtaaagagaatggatcattaattgtagaagttgcttaacttcagactgaaatcctctcgtttcctgatctttcatactcatttttacctcaatttatcctaatttggcgaaaaaaatcgatatgacttaaaaggtggggatagttaagcaagtttcaagggagcagagcttaataacattaataaaaatactgaaatgccataaaggcaagcatgatataaagccattggcggtatgtagatcaccgcgataaatggttatcaccatcatgggctaaaatcgcttgtgcacctaaattcgcctcttcaatagcatgttttatggaatcggcatgagcaagcaccacgcctaaacgacgatgtcctgcgatttcaggtttagcaaataaacgaatttgtcgatttgccttaagcgctttttctaaccccgtatagacaatattagtactagacaactcaggtaaaatcaccgcggaagcacaagcacctaattggcgaataccaccgatgggatagcctaaaaaagcacgcacatggagcgcaaattctgataaatcttgtgaaattaaggtaacaagccctgtatcatgaggacgcggtgatacttcattaaaaaacacctcatcaccttggataaatagttccacaccaaataacccataaccgcccaaattctccactactttactggcgatatgttgtgctttggcaagggcaatatcactcattttttgtggttgccatgacgcacgataatcgcctttttcttgccgatgaccaataggctcgcaaaaatgaataccatcaatagcacgaatcgtgagtaatgttatctcaaaatcaaacgggatcatcttttcaacaatcacgcgcccttgccctgctcttcccccttcttgagaataagtccatgcactagtgagatcttgctctgaacgaataacactttgtccttttccagatgagctcatcaccggttttacaatgcaaggaaaaccaatctcaaccgccgcttttctaaaagccgcttcatcatcaacaaattgataaggagaagtcagtaagtgtaatgtttctgcagcgagacggcgtattccttccctatccatagtgagttttactgcacgggcacaaggtacaactttttgaccattattttctaattcgactaataatgaagtagcaatagcttcaatttcaggcaccaaaaaatcgggtttttcttgagttataatctgttttaatgcctcgctatcaagcatattgacgacataatggcgatgagcaacatgcattgccggcgcattggcatagcgatcaaccgcaatagtctcaatgccaagacgttggcattcaatgatcacctctttacctaattcgcctgcacctaataacatcacttttgtggcattagtggtcagagccgttcccaaaatggtcattttcgatccttatctcagtcagataatacgcattacgcaaacgtttgcatttggtggtagcataacggaatttaacaaagagaaaaatagccatagtaaaatttaaatactttatattttttggctatgctgacctttatgaatttttaaggcattaaggcgctttctaatcagcgcaaaaatacaacacaatagccctaaccaaatcaatgaaaaacttactcctttcacagcatcaaatgcttcatggaataggaatacggccagtaaaaattgcattgtcggttcaatatactgtgctaaaccaataacggttaaggtggttctttttattgctgcggtaaaaaacagtaaagggagaatagtcactggcgcggttaaaatataatagaaacgagttaaattgtctgcagaagaaaacgcactttcatctcgcataatcagccaaatcatcgcccctatagcgaccggaattagccacaaagtttcaataaataatgaagttatgacatcaaaacgaataaatttacgaatgagtccataaatcgcaaatgctcctcccatcacgagtgccagtatgggtaattgaccatacatccataattgatatcccactcctgcacaaattaatattaccgcccatttttcagcaggatttaatttctctttaagaaagataacgcccaatacaatagaaaaaagtggattaataaaataccccagactggcggctaagacttgttgatgcgtaagtgcataagtaaaggtgcaccaagagactgccattgctaatgaactaaataaacacataaaaatagagcgtctatcttggagaacagcacgccagcgagttctatttttaataaataatcgaaccagtaataacaggggaatagaccaaataagacgttgtgcaagtaactctaatggttgagcaccgggtaatagccgataaaaaagaggggttattccccataaaatataggagcaaatggctaataacacacctgactgagcccacatatgactttccaccaatagcgttaaagagaccttactatcatacgccgaaaacgaatcaaacaatatgatcatatccgctacttatcagcgtcaaagtaagcgattatcaaaataaaccactgagtaaaacataaaaaaaatctctataaataaagttgtataaaccttatttatagagatcacaaaaagaccagagcaaaggggaaaataggacttacaagcaaataaacaaataatccattaaaaaatatctcgtacatgtaacggcggttgtttactgacaaattcacgcaatacttttcggctcggtgctgcagcaatagcgccctttttagtggttgctaatgcgccacaggccgcggcttgcgtaataatttttaataaatattgttcatcatcagcaaaaccatattctgcaactgcggctaataatccagacataaaggcatcacctgcccctgtggtatcaacacaattgacggtaaaggcactcaaggcaacttgtgttgtaggcgtcaacactaaacatcctttagagccttgggtgatcacttttaaacgagcaggataatcagctaatttttttaatgcattttctaaggtaatttcctgagtcatccaagtcagttcatcttcagataatttcaaaatatctgctttatgagcatattcatcgatgatcgcacgcatttcttcatgatcacgccacatttgggggcgtaaattaatatcgaaactcagtaaagagtcgctattttttactttactaatagcactatctagcgtcgagcgacaaattggattaactaaagcaagtgaacaaaaatgtaaaatgtctttttcaaatacaggcagtgatttattggtaagaaattgatcagcagagtccgcaactaaaaaagtaaaatctcgttcgccattttcttgcaacgaaactaagactgtactggtacgatgtaactcatcaaattccattgtgctggtatctacaccgagatcaaataaggttttttgcataaagtgaccaaatgcatcttcaccgacccgaccaataaagccactttgctgtcctaattttgcaacacctgcagcgacattcactggtgctccaccagcacatgcttcatattgcatattttgcagtggaattaggtcaacaaccgcatcacctaaagaccagactttcataatctctcctgaagataagccactatttttattcactatattttatttttatcagtattaataactaaaaaaataaagatattgctcgaaaaaacatcctgataacgttaacataatggtgtacaataataaagataaattcaaacaacacgctttttaaccctaaatgttatcgctaataagggtgacatatagcttacagaataactgataaaatcaggataatgagatgaagcaacgtttagaacaatcgacaactgccctaaatgccttacaaaaaaaacgtggagagcaattttatcctcaattccatttagccgctcctgcgggatggcttaatgatcctaatggccttgtttatcataacggcttatatcatgcattttatcaacatcatcctttttctgaactttgggggccgatgcattggggacatgctaccagcaaagatatgatccactggcaacatcagccaatcgcccttgctccgggcaatgagtatgataaaagtggttgcttttccggatcagcggtaagtcatgaaggtaaattatacctcttttataccggccataactggttagcagaagaaggcgatgacagccaaatttaccaagcacaatgtgtggcagtcagtgaagatgggatccattttgaaaagaaaggcattatcttaccgccaccacaaggatatatgcactttcgtgatccaaaagtttggtttcaagaagggaaatggtggatggtagtcggtgcccgcgatgaaaaagaccaaggccaagtgttacttttctccaatgacaccctatttgaagaagggaaacaatggcgttcggagtacaaggtattaggcaaaaccgatgataaaaacgtctacatgtgggaatgccctgacttttttcctatcagtgatgataacgaatttgctcttgttttttcaccacaaggaaaacgcgctgaaggttatcaataccgtaatctgtttcaaaccggtgcactgatcggtcagtggtcaccaaaacaaccttttatcatacatggtcattttactgagcttgataatggtcatgactattatgctccacaatcttttgttactgctgatggtcgccgtgtttctatgggatggatggatatgtggaactcccctatgccttcgcaacaggagttttgggctggttgtttcacgcttcctcgtgaaattaactttgataaaagggcaaaccgtttacgtatgaccccgataaaagaagttgaaagtctaagacaaacaagaaatacgatagagatgaccacactcaataaccaagcgcttaaattactcgataagacaccggctattgagttaaatttaacctggtcattagatagccaagcggaaaaatttggattatggctaggaaaaggtttagaggtatttgtcgataatcaatcaaatcgctttgtgatccgtcgccattatccacaatataatatcagtggatcacgtagcacaccgttgccagtaggatgcgaaattaacttacgtatatttattgatcgctcatcaatagaggtttttatcaatcacggagagctgacctttagtagccgttattatgcagatgaaaatgatcgcgatttatcgctatttgccacagatggcagtgccacattaatcgccggtgaatattggacactatcaacgataagttgagcgttgtaatgtttctatactctctaacggaaagagagtctcgttacagagactctcgttcaattaactgacaggggacttgtactgttttattatgattacgctcttgaataatatgtaatgttgcttctttacctaagtcataatgtggcaactgtactgtggtgagtggcggatagaataactcccccgttcctatcatattgtcatagcctaatacagccacttgctcaggaatacgtaatcccatcgacagtaaaacttgataagccaaaaatgcgatacgatcattaccacagattaaaatatcaaaatctgctttttgctgacgacagtgttgttgtaacaatccaatcacatcacggtaatgttcatcgccaaataacattgtgtattgacgcaatgatgacaaaggtaagccggcatcttgccaagcatcttcgaccgctttacggcgaatagggcctgcaacggtatcttcgggtagataaaaacataacggatgccgataacctttttcaatcacgtgttttatcgcaaaatattgtccgtgataatcatcaggaatataggttggaaaagtttgatctttagctaggcagttggcaagtaccacatttttatcacgtagcttttcatgtaccgtgatttctcgcaatcccattgtggtatagatgataccatctggacgttgagctaacagttgccaaatggcttgatcatacccatcttgttcagtgaggtttacaacaaatgagctccagccaaactgacgagcggtacgctcgatggataaaatcatttccacggaaaaaggggtcgttgcggtatcaataccaagcacaccgatcgatgagaccttagtcccttgacctcgaatttttcgcgctgaaaaatcgggcacataattcagttcttcgattgcgcgttggacttgtttcaacgtatctggttttaataactcagggttattaatcgctcttgagactgtcatcaaagaaacagatgcaagtcgagcaacatctttcagtgacgccataatattggctcgattgggttgttaagtaaggtaattataaataatgctctattttacaataagtaaagagagaaatccacattctcaagaccatacaaatataagtatgacaaattattttagttaataaactaatcaaaaaacaattatcaatattaattatactcacactagatgtttaatatagttaaaaacacttacgataaaaaacttagttacaattaataacagttatatgaacttcgtttatagaagaaaaatatctttaacgataaaatagaaatattgaaacaaaacaaagttctgatattttatctataatataatgaaaaagtattaatacttttttatttaatatatccttattatggctccgttacgtgaatactactctacatagaaaatttataaattagtcaaatttcgttactcatttactcttgattaagagaggaataaaattgggagcaacatatggaatcgataatccatctgatcactttcgaagatgacagcacaaaagttcaacttaaagcagtgctttcttctttagcggcaaatgtgaaaacctattcaaatgaacaggcatttttaaagtactatttttcatcaactaaaggggctcataaagagtgcatcataattaacactaaaagtagtgcatcgccatcaattgcgttggtaaaagagttaaacaaattaaagaatatcattcctgttataattatttcgggagatgcatcgatagaaagttgccgtaacgcatttaaagcgggggctttcgaatatttaactcgccctttaaacgtcaatgagcttcttaatattgtgtcagaatcttttttacactatgaaagtgaggttgagcaattcagaacctatatttctttaaaagataagtttagtaaactatcaaatagagaaaaagaggtaatggagatgatccttgacggtaacaccagtaaagaagcagccgaaaagctctctttatcaccaagaacagtggaagttcatcgttcgaatatgtatacaaaactaaaaataagatcactaccacaactagtacaagaatatgatttctttaaaaaatatgacttaagagccaattaaatttagcccgtatatcttctttatcattagatgatatccagcgcttgtataacagcttaatcgactttcgtttcattattatttattaatgagagtaaactgtattgtaaaaatattctatttttgatgaataagtattgaatatggaaataataaatatactaagctccattctgcaacagaagggaaggctatcctattttgacgcctccctttcataagtcatacaaatactccaacctctaacctgaacaattagtatattttatttttataatcgctattattaataacgccctccctattcattgttaataatggcgaaacgataaaataaacactatttaatttgacataaatcatttttcacctcttacagacataactactattgacaatcaatttctgatttactgtcttattttttaactaaaaatattgctgattaaaaaagaacaaaaaaggaatcgctgtctcttttttatgtctagataaagtacagtaattgtctagtgactttaaattaatctatatttaccttatagaaaaaataattaaaataacaaaaaaatcataaacaacctcataaaatagctgatggatgtcataactctggttctttttagtctattatttagaaattaattctctttattgttgagctattttaatatataacaaattttttctactcacccacatcataataggaatatcattttaggaaaaaatgattacgtaaaaacaactaaacaaaaataagtattaacacctaaagaataagtattttttgtcgattgaatatttatcctagcttaatcaatgagcctacttttttattcacttataaaatttattagataatcttataatttgatcttcattttctttttacttaaacgtattatgctaataccttgtgtactcactaatatttttttgtaaaaaaaatgaataatgaagaaaaaaatcgtcgtcctataaaagcaagacaaaccaactgggcaactcgctgtagtcgctggctgcaaagcaaaggcgctacccccaatgggatctctttatttagtatcctattcgctgctatctccggtttgtttctctactttgctctcgctcactcccaaggcctacttcaatcaatccttcttattttaggtgcattagctatccagggtagacttatctgtaacctactcgatggtatggtcgcagttgaaggcggattaaaaagtcctgctggtgccgtttataacgaactaccagaccgaatagctgatacattgattattattggtgtaggttatggtttatccatcacttttcctatcgctattaccttaggctgggtagccgctttctttgcggtaatgacagcttatatccgtgtattaggtggtagttgtgggttagaacagcgttttacggggccaatggccaagcaacatagaatggcattattaaccggtattgccattatctctgcatttattcccgctgaatggggagcatggctctgtttagtctccctgtggatcattatcttcggctcagtacttactaccattttgagaactcgccaaattttacgcgatttaacacaaggagttgatgaatgaaaaatggcaaactctctttcgatgcaaaaatcatatcatcagtcttagtctctatctgtcgttttttaaccgggatcagagccaaacaaatatctccgattgagaaagataaaccttgtatttattacgcaaatcactcaagtcatctagatggtttagttatttggtcttcacttgccccccatattcgcccatttgtgcaccctgttgctgcagaagattattggaataaaaaccgtttacgtcgttatctttctcgtcgtatctttcgtgcagttttgatcccacgccacgcgaataaaacaaatgttactgaaggaaatggtgaaacaacaactgcacctcagaaagtaaatgctcttacactgatgcaggctgttttagataaaggtgaatcgctaattattttccctgaagggacaagaggtaacggtgagtctattcaggattttaaagccggtctttggcatttgtcccgtaacaatccacaggctcaattagtccctatctatcttgaaaacttaaaccgcgtacttcctaaaggctctcggcttgtcgttcctatcatttgtagtgccacatttggcccgcctattgagccgacacatgaaaatgaagataagactgaatttctattaagagccaaaagtgcgttagaggagttacatcatggatagtatcaacaatgaaattctctggatctttatcgggctattctcctttttaattattgccagtattattggtgcgatccttgcggcactcaaaggtcctacctcaaccattaccaatcttaattctcgaattaaagcttggtggatcatgtgtatcatttctgccgtcgctattagtattggaacaataggctcagttatcctcttcgccttaatttcatggcttgcattacgtgaattggttacattaaccccgactcatcgaggtgatcacgaagcacttttttggtgtttctttgtcgtgctacctatccaatatattctcgtcggtgtgcaatggtataatttgctagccatctttattccggtttatgccttcttattaattccaacacgtatggcgctttccggagatactcatcactttctcgagcgcatggcaaaagtgcaatggagtgtcatgatagctatctattgccttagctacgctccagcattattaatgttaccgatagaaggctttgaaggacgtaatattaacttattactgtttttgatgatcgtggtacagacttctgatgttttacaatatgtgtttggtaaactatttggcaaacatcctatcgtaccgaaattaagtcctaataaaaccatcgaaggtttctttggcggcattatttcagccagccttatagggatgatgttatggtgggcaacgcctttcacatggtgggctgcttttttactctctttagtcatcacactcgcaggctttgctggcggtttatgtatgtcagccataaaaagagatagtggcgtaaaagatttcggtactatgattgaaggccacggcggtatgatggatagaatggattctttgtgctttgccgcccctattttcttccacgttattcgctatttctacgtgtaattcccttttgaataaatgctggtaatctgcaaaattattaccagcatttctataaataaatcatcgagttattatcgtcaatgtaattaatcgcttgttttaactcaattaaaaatacctatacttaagctttatttttataaatcaacatattaaataagaataatcccatactcgaaatccgaccacttctttttttaacttattgtcatagatcacattattactatcttttaatctagcgtttcctttttatttttttgtagataattatgatcacttggttacttcttgctttatctttattgttattagggttccatcgcaaacttgcacttactactttagctataaccaccattagcgcatttataacaggtgttatcacttggtatgtacttccggttatattgagcttgattttactctcttgtgcatatcgccattacaaaacaaatcgtcttattgccactattgttattcttgcatttatcgccattattgttgggttaacttttcattttattcctggttttaataacttacgctacattaaacatgttccattagggcaatatagcccccctttctctttttatttcaatgccgataaagcattaatcccttttattttaatgatttttattcctacattatttaaaacagagccagtaaaaaaagccaataaatatcaatgggttttactggctatggcgatccccgcactgttattattcgcaatggcattgggtggactcgctattgaattacatttgccacaatggctacccgcctttatgttagcaaatattttctttgtctctcttgctgaagaagcactatttagaggagccatacagcaaagtctatctcgctatttatctccctatcttgcgctatttattaccgctattttatttgggttagtccattttgccggggggatattactcattatcttcgcctcattggcaggtattatttatggcttagcgtggatgtggagcggtaggctttgggttgctacactctttcattttgcactgaatctcactcacctgctctttttcacttacccttttaaaatcgcgtaagtgctatattattctgctgtattttaagttttagtctttccgtctctttactcgtttaatactaatacgagtaaagaggatgggtgaaacgtgaaagcagtcacactattaacttatcgatcatcttaattttcccatcattagctgaaattttttgttagtatgccctttatcgcttatctataaataacaaaaattttatacaacatataataacaaataagccaaaataacagcgattgacagcataaaaaatacccactattgcactgtgataggtatccatcacacaaaaatagattatttttaccatacacattatgtgacttttacctctttcaccatcaggaaaaagaatatgttagatcaagagatgatccgtacttttattcaagtagcagattgccaaagctttactaaagcggcggagatgttacacaaaacatctgcggccatcagctatcggatcaaaaccctagaagagaatattggtacacagttgtttaatcgtacgacaagaaccgtcacattaacgccggcaggggaatatttattagagaaatgtcgccagtggattgtttggcttgaatcaatgcctatcgagctacagcagatgaatgcgggagttgagcaccaagttaatattgttattaataacttactctatgatcgtaccgccgtggccagtatgttagcctgcctgcaccagcgttttccttctacccaatttcatattactcgacaagtttatatgggagtatgggacgcgttaattaatgaagattaccattttgccattggtgtcacaggtaatgaatcactgaaaaataatattaatatttgtgctatgggggaaattcaatggcaatttgtcgtggcaccaaatcatccattagccaatgttagtggggtattaagtgatgatcaaatgcggatatactctgccgtcaatgttgaagatacttcacgccatctttccaaacgcaccgcttggcgtctatctggacaacatgaaattaaagtgcctgatttacatactaaactagcatgtcatttaaaaggtgtcgggatcggttttttaccattaagtctatgtaagccactgattgatagtggacaacttattgcaaaggaagtgaaaaatcgtcgccataattctcccctatcactagcttggtgcgaagataaaaaaggtgccgttgtcagctatctggttgatttgttccgacaagggcatcccagtgtgcaatctttttacgatccccttaactaaaaaaggcaaaccgaagtttgcccttgttgataacattaaacttaatgcgttagttggtcgctgtggcgtcaggattttctttaataaataagcttgccacaatacctatgcaaatcaggatagcagcaaaatagaagccggaatccatacttcctgttttatctgataaaaaacccgttaatgtaggggcaaatactgaacctagcataccaatacagttatacacaccaaaagatgtccctaatgcatggcgtggtgaattatctgccactaccgccactaatactggattagtactaattttccctacgatcccgtataagatcagtgcaccaatcagtaccggcatagaatctgacataggtacagcaagaatagccactaaagataacggtaacataattaatagcacaggcttacgacggcctaatttatcagagaaccagctaaataagagtgagccaggaatagcaaaccaaggcatgagtgatgctatggtagagatctgtgttcctgtaataccacgctcggtttcaagataatagggtaaccaagtgactaaaacaaagaacccatagattgaacagaagatagtaatataagcaaggttaatattacggttaccaaataaatctttaaacgtcagttttgttttctgttttggtgcattaggagccgtatccgtagctttcgttttaggtttatcttttattatccataacatcatcaaaccaatgataataataggtaccccaataatatagaatggtgcacgccagctcatccccatctcaccgacagaaatactagagatgtagtaaccgatggataaaccaaacgccataccactattgataatggcactacctagcgtaatacgatgttttggaatagcttctgaagataaaccatattgtggaccataatagaatccttggaataccccgaccatcacccatgcaaacataaaggtgacataagttggcatcatccctgcgataatggtaaatccaccaaagagcacaacccccgtgactaagacttttttcttacctaaatagtcaccaattatgcctgatggaatgttcagtgctgtataaccaataaagaaaatactcataattgagccaagttgcgctttggtaagatcaaactcagcaccaatattcaccattaaaggaccgacaatggcacggctaccatacagtgcaatccaaccaaaaaagaaaataatcgtcagcttgacccaataagggactttgcctttactctcattcacttgtgcatcgttcataatgacgctcctgacagaatgttattaagacttataaattaaagtgccagactgaccttcaataacctgttgaatgttttgtaatgcgccaatatgagcttgttgtcctgtggcatttacaaaatcactgacagccatgatttttggtcccattgcgccatcagcgactgccattggtgcaagttcttctggtgttgcttcacgaatagcagcttgttctggtgttccccaatttttataaatggcatcagcctctgttaaaataacaaagtgctctgcatttaactcacgagaaattaaagctgctgttaaatctttatctataacggcttcactaccaataaattcattatttatattattaactggaatacctcctccaccgccacaaataacaatatgacctttatctaataaaagctttactgcctctatatcaattattttttgaggtgctggtgaaggtacgacacggcgataatattgcccatcttttttaaatgtccattgatatttatttattaattcttctttttctgcttcctcataaataggaccaataaatttactcggctctctaaaagcctcatcattaatatcaacagaaacacgagtcattactgtagtaattgcttgcgtaggattattttgattaattttctgcatcatcatataaccaatcatcccctggctttccgcgaccaagatatccaacggataggctggaaccgcttgataagcaagattttgtaatgctaacaacccaacctgaggcccattaccatgtactaaaacaacacggtactcttgcgctaatttattaattgtctctgacattaattcaatatttttatattgattttcagcagataaaacttcgccacgctgtaataatgcatttccgcctaaagcaataacaattgttttcataattatccgtttccgaacgtttataatttctttttaataaaaaagattaatctatacgctgttgttgtttaatttgataaccaatccataatcccagtaaagtatctgcaccggaatgatgaccgatagagagtatttccaacatatctttaaaaataatctctttattttttatttttttacctagttgaataagataggtagaaaatattccccgtgtggcgtattccaaataatgttgactcactatcgtagttaatgacgataatggtggtgtttcattaaaaaaatgttcaatcgatttttctggctctgctaaataatgcgcaaataacattcccaccagcatatcatctgaactcggtgttaaccctggacctttaccaataaacatcgcccaattaaccgcttttccagacaattgatgataaaataactttgttaataacttaatttcatcaagtcgggcgatttgacgatagttttttaatggcccatagagtcctgtcgctatcaccggagataatagagaaaaaaaactctctaaccatcgtaaatctaatgtcgctttatcttgtaaacgcaaattttcactatcaccggcaatcaatgtcatattatctgcgattgcgatttgattgtttttcatccgcattttcaaagcgggatgacactgcttagccaaagaatcaaaatcggcttgtttcagtagccaccccatcgggcttaatcctcttccttgccgatgaaaagtgattaagcgttgctgagggcaaataaaattcaaagcatgttcataaatgccgacacatttaaactcaccttcaaaagcaaagatatgctgactggtttgaagtgcttgaatttgcatattgccccctgacgaccgtgttattacaaaacgtgattaagcttcaatgcctaattcttctgctaatgccactatcgctttttcaaaacagcctaaaggtgcacgtaccgttcctgcgccaatttgcccaacccccggctctttatgagcaatacccgtattaattagcggtgtaatacccgtttcaacaactcgacgagcatctaaacctaaacacgcaccttggaaatcccaagtcggtatttgtagcatcatattacgagcaaggtagatttcagccatctcttctgtcacttcacgtgctgcatccataccacccgatgctccgacaaagcgggttactcccggagctgcaaccattgctgcaccaccaataccgaaagtttcagtaatagcactatcaccaatatcagggttggcatctgcttggctaaaaccagagaagaataatccttgtggcgtattaacaggtgctgtaaaccattgatcacccataccacttattttgatgccaaaattactaccattacgtgtcattaccgtcacaatcgtaccttgcttaatttgtgctcctgcgtccatcgccgctttacaataagccatggctaaattaaggaagaattggtcagtaatactgaggaatttggtcactttagttatctcagccgcatctaaatccaatgtgctaagaattggcgccagctctcgtaacaatagtgcagaagctgcaatattacgttggtggaattcatcccccatcgtaatggcttgacccataattgccgtaaggtctatcccattctcaatggtggctaaagctgcttttaataccggagctaagctattacgcatccaatgcaaacgttcttgtacatcaggaccataagcaccaaaacgcatcactttaccaataccttcgttcatattgcagtaagcatagttaccgtgaacatggtttttaatcactagcattggcatatgagcagaagtaataccgcccatcggccctacggcattgacattatggcaaggaataaactcaatctctcccgcctctaacatagccaaggcttgtgcttcattttcagcccaaccttcaaataagctagcaccaatacaggcgccacggacagggccactcatttcttgccaagttacaggaggtcccgcatgcagtaatttttttcctgttgctaacgttggcactacttcttttgctaaactcacatcacaccagtgaggacgggcttcacggatacgttcgataactgcttcattcgcttgttcgatagttgagtacatatctgcaattccttatttcaatttctttaatatttcagccagttttttattaccacctgcgacaggtgcccattgataatgaacaacaggcgtaccactggattgcagatcgtcagcaaaactgcgtaatccggcgttgatcacggagatcccatttaaaagtggtgaaatttcagcagcggcttctactggatgtggctggattaattctttggctaacagtacgacttctggcaaggtatccatcacaataatacctgcatcttgtagctgtttttgttgctcactacggttttgaggatcttcctgcgtaccggtaatagtggcgatagtaatcagtggattagcttcaccacgtttttcatttaattttttaatttcttgaattaatgcacctgctggatctgacgttgcaccataaccaatcacaaagtcgaccagtaatacgccaatatcatgcttattacttaattcactaataaatttattgcgagtagaaggatctatcattggatggggtttgccttgggtataaaaatcatcgcccatatcaataattttatgcccttgtgcatcgagcatcgtaccttgcttatgttcgttatctaccgccacattgagttgctcagataacaacatcgcgcattctgccgctaatgttccacccgcatataatccaataatctttttacctgccactttgggtaactgagcagcactatcttcaacacgtgctaacgtagccgcaatacgcgccgtttcgtctaaggtgcgagtaaaatagatattatcgtcttgatatttctctggtgttgttcctaagaattgcgccactatcggtttattatgacgcttcatttctgcaataattttttcacgtactgcaggcgcgggaggtttagaaacaaaagcaatcacacgggtttgaggatctgccgccagcatattaatagccgtgatagcactaatgccaccaatttgctcgctgagatctcgtccccccagacctattgcatgagaaaccccttggcgttgtaatacaatttgtgaggtgatctcttgaattcctgtccctgatgcaccaacgataccaatagagcctttcggtgcaatgttagcaaaggctaaaggtgcgccagcaatatttgccgtaccacagtcaggccccatgactatcaatccgttagcggcggctttttcttttaatgctttttcatcagcaatagagacgttatcggaaaatagcatcacattacagccatcttctaatcccgtatcagctaattctgcagcatactcaccggcaatagaaataagcaacatattagcgttaggacttttttgtttagccgtacgccagctacgtacagtggttaatttattaccacttttttgaccgttagcaatatcagctaaggcttcttctaacgcactggagatagtctcgataatagcgggatcgtctgattcagctttaatcgaaacacagatatcattaggtgtcgcttcgttaaaaatgtcatgccaaaaaccggtgacatcaaggagagatttattcgctggtgttcccatcatgacggaaatttcttccacctcaggggcttcacttaattttcgggaaattatcatcaggctgacggaatcctgaaagctcccttttttaataaaagcatggatcattataatatccttaacgcatttaatatatgtaactgcacatatctagttgcatttcgtttttttgataataagaagcctatttacttaatagcttaagtaatataaataaaattcgagatagacatgtttgaaactctgtatacaaacatactgaataaatatcaaaaagtagagtgattaaagtcacagttatttattgtaaaaaatttttatttaatcagtcgctatttattaaataaattataatgagtggaatgagtaaaaataaaaaaacaacagattgagtaaattaatttatataaaataaattaatcatatagttagccataccaaatggtatgacaaatcaaggaatttataataaatttaacaaacaagtaacataacgcagttagccgatattatcaacaaataaaaagcactttattaataaacaaagtgccttaaataattttcatataaataaacataagtctacattttacttttacacccttgctaaaaataatattattgaaaaaaagcaaaaataatgcctataaaaataatatttataggcattttaaaattaataagttttaaataaattcaagaacaaattaacgttgtgaatctaaagtttcattattctttataacatcttgagctttactataactttcaattaataactgataagcagggaatatttgggtataagcttgagcccattcagcggcatctgcacggttccaagttttttgcatttcagaagccactgctgccgtatccataggcacaacaccggcttgaacaatacgtgctaaggtaatttcttctgccattttgctatacgttcctgatgcatcaatcacagcaaaaacttgataaccttcagcaacagcactaattgctgggaacgccatgcaaacactcgtaatagtaccagcaataattaattgctttttacccgttgctttcacagcttcaacaaactcagggttatcccatgcgttaatttcacctttacgggcaacatatttagcatgtggtgcattttgatgaatttctggaattaatgggccattaggaccttgagggacagaagccgttgtaataactggcatcttcgctaatgttgccatttttgctaataccgcagcacgagcacgtaattccgtcattggcatatcgccaacggtttggaataaaccactttggtgatcgatcaataacataacagcatcatctggattaataactggacgttgaccattgaaatttgcaggagtactcatttatttattccttctaattaacaaaaacgattattaacaatatgaagaagatataaggaaatagcgttaattatctcctcgctctcgatataattaacaatagtcaattaattaaaaagtcggtagtagcaataatgataaacactattctaaaaatagaacactgaaacacttttgtcattgttctatttttagaataatgaaacctattttcccctctactcaaatcaatatagctcattagaataccacctatagaaattttataggaatatcattatgaaaaaaattattggtgtttataaagcgcctcgtcaacattgggtcggtgatggcttccatgtacgctcactatttagttatggtgatcatggtaaatatttaaatccatttttattattagacagagccggcccgactgatttccctgcctctcaaggccataaccgtggtgtaggcgaacaccctcaccgtgggtttgagactgtgactattgtctataaaggggaagtggcacatcacgattctacaggtgaaggaggagtgattggccctggagatgtacaatggatgaccgcagcatcaggtatattacatcaagagtatcactctgatgcctttaaccaagcgggaggcatacttgatatggtgcagttatgggtaaacctcccatctcatgctaaatcagcgcctgctggctatcagttactcaaagagagtgctattccagtgcttccattagcgaatgatgccggacaactgcgcgtgattgcgggggaatatcatcaaactcaaggggcggcaaaaaccttttcacctgttgacgtttgggatattcaattgaaaagtggtaaatctacgaccttaccaagcaaaaaagatcgctatgtgggattagtgatactccatggtagcgcctatcttgatagccaaactcaattaaatacgggcgatttggttattttagataatcaaggtggctcaattaatcttgaagccattgaagatgcgattgtgttatatcttagcggagagccaattaatgagcctgtagttggttatggtccatttgtgatgaacagcaaagatgaaattaggcaagctattgatgactttaaccaaggtaaatttggtcgtatcccaaacgaaatatgattaatactctccttgctctataacttttataacaaacggctgctcacttagagcagtcgtttgtatctattttttactctttatatggagccatattctgcgctaaataatctaataacacttgaatagcgggtaataaaccttttcgtgacggatacacggcatgaataacatctttaggaaaacgccactgtggtaagacttccaccaaagagccatctgctaactctttctctacgacactcaatggtaaacgcgtgatcccaagtccctttaatgttgctttatataaggtcatcacatccgttgtcgctaatttaggtgtaacatgttgcgttgaaacagtaccatcattatgggtaagcgttagcgtatactgctgcgaatgttcgctattagctaaaataggataatcagcaagttgctctggagaatcaggcgcactgttggttgcaaataatagcggattagcaaccaaaacacggcgagaataacctaatattttcatcgttaagccagaatcatccaaaggtaatgctctaactcgtaaagctaagtcaagaccttcactgatcacatccacagggcgattgatcgctaaaatttgtatattgatatcaggatattttgccataaaatccaccaaaatatcttgaatataaatttgcagtaatgcaactgggcaagagagtttgatcgtgccgtgaggatgcccctgtgctgaacaaataacctcttgagcaatctccgcttgttcaacgacatttttacactgttggtaaaaagtttgccctatcttagtgacatgaaattgacgagttgaacgatagatcagcgagacctttagtctctcttctaaatcagcaatacgacgactaagttttgatttaggaatacctaacgtttcggccgcttgtgaaaaaccgccaaactccaccactttaacaaaataatagaggtcatttagatcatacttcatcgcctattacctatttaattgtcattatataaaaactgaattgtttcagcttcggaaattatgatacatatattatgatctattttcacgctaataatatattataggctgatattttagtaaaataaaaataaccattaattatagcaatataatataaataaaaatggagattattttaattctgtgatgcttatttttaattacataacacaataaaaaataaaaaaacagggatagttaaaaagattattactatttaaattaatttaacacaaaacaactagcctgagtaaacaataaatcacctaaacaataatgactataaaacaaatagttatttaaaaacttaattacaaaccaagatgttaagatttaattttatttttatgatattaatcaatgtatatttaaaaatatgttaataagattataattaataaaaatacttatttacataatctgtcacttacaattatttcttacacctgtttttaatggaataacctgatgaataaattaactccattacgacctatgcctaccttaattgcggttgctattacccttatcatttggtttgttatccctgttccccaaggggtagatcccaatgcttggcacttgttagcgctgtttgttggtactattgcggctattatcggcaaagccttacctataggggcagtatccattattgctattgcgcttgttgccgcaacaggcgtcactaacccagactcaactaaaggggcgattaatgatgcattaagtggcttttccaacaatcttatctggttaatcggtatttctattatggtttcaatgagtcttaataaaaccggattaggtgctagaattggttactattttatttcgttatttggtaaaaaaaccattggtatcgcttattccctagctattgcagaaacgatcctcgcccctgttactccaagtaatacagctcgaggtggcgggattattcacccaataatgcgatctattgccgatagctttaattcaaaacccgaagagggtactagtggtaagattggtcgttatttatcgctagtcaattataatatcaatcctatcacctcagcgatgtttattactgcaaccgcgcctaatcctcttattgtaagcttaattatcggtgaaacagggtctgaaaatgagttaacttggtcaatgtgggcaatagcggcttttgttcccgccattgtttcattatttttaatgccgattgtgatctactttttatataaaccagagataacccatacgccgaatgctccccactttgccaaagagcgtttagctcaattaggccctatttcattgccagaaaaaatcactttgggagtatttgcactgttattaattatgtgggcaggaatacccgcactattatttggtgatgcttttagtattaatgcgactactgcggcttttattggtttatcaatcttattatgtactggcgtattaaattgggatgatattttaaaaaacaaaggtgcatgggataccgtggtttggttttccgcattagtaatgatggcctcttttttaggaaaattaggtctaattaaatggctctcattaagtgtgggtgccggtattgatagtatggggataagctgggtaagtggtatgatattactcgtgctgatttatgtctattctcactatttctttgctagcaccacggctcatattaccgccatgtttgctgcattctatgccgcaggtttagctcttggcgcgccaccaatgttattaggacttattttagctttctcttcttcattaatgatgtctttaactcattacggtacaggtactgcaccgattattttcggctcaggctacgcgaccttaggtgagtggtggaaagcaggttttgttatgagcattgttaacctcattatctggataacccttggtagtttatggtggaaggtgctggggtattggtaaaataataaaaaccaaaatatgatgcctaatcagtctgttaggcatcatattaactagcgccaaagttcacacttttcgacaatcgtctcagaatgataataactttctttataggctattccttcttgatcaaaacaatcatttatatcctgaaaaaaataatttaatttaactttaaaaatataagataataagtaaattacatccacatgaatattgcactccccattttcaaagcgtgattgatgttgctggcttactcctaataaagcaccaagctcactacccgtcataccatgttgttgtcttaacatttttattcttgcgccaactatctttgatatttttttattcataatcgcctcgaatgacaaaaccatatcgaaaaatatattattatcactcatataagatatttactgttgctgttgagttagcactacctggcgttattttattacctgtttttatatatcttgctttccaaccaaatatataatcaccggaggagaccccattttgtagactattttttgtatttagttttatcgggttattgtttttatctaataactgaatggcaacaccagtggctcgattagtgcccgataagtttaatttccctgtatttacatctatatatccagcactacttgtcactgtcgctttaatgttagtgccagccgcacagtttaatgtaataggaatatctacacttttactgacatcaccaatatttttaaattgagtatcataccaaatccccatattaatattataatttgatgattttgtagtacattttaatgaatttatctttattgcattaagaggcaaataaagtgaagttaagttccaagttgtgtttttaggttgtgtattattttgtactgcttgagcaatcttgccccattgaaggcttcctgattgcgttactctgcctgttttcattatataaactgtccaattcgggtattcaaataaatatgagttgtgtgttccatcgcctttcttagaccaagtggtgtttaacgcgccaaatttattgaaataaacttgaattcctataccagggatatttgtctgtactattttctcagcatttggtacccatccattagtataatttgccgaaattatagagttaccacatttcccatcattacctgaaaaagtttttataggtcctgctctataattaattataatcttatctaatatacctgtgcgcatatcatcatattgaagtgtataaactttattgggtatattaacccaaatattttttaaattaggattttgaatacaagccgcaaaggagttagctgagaaaaacaataatgtagctaataaaaaaatttttttatttattaaatgattcatttttattccctattatatttgatattttattttctatttctactttatcttcatcatctaattgaaaaagatcacttaaactaataccgaaaaagcaagcatattgataaagcctatctagactcactcgattaattccccgttcatatcttgattgctgctgttgacttatacctattttcttagccaattcacttaatgtgaggccattaaccctacggtaataagcgattttttttcctaccatctttgatgctggataagagcgattcacttgaaacccctttatgacacatttaattataaataagagtaaattcaagatggctcttaaatgatcccaccgttatattatttccatagccaaccattcttgccgataaagcaaattccgcattatggttatatttattaacagccgtcattaatttatcattattttttacaatacctttattattttgcattgctaaatttagtgctatatctttagcagtcccactattaataaaatattccgaataattaggaacactttggcctcttaaaatcatagtgactttctctgtattaactgggcaattttttaattttatagaaaaatctatccagtctgatgcttgaccatttttaatatttctaatattgattttttttaaatcaattaagtggtttttcgtttctaactcacaaggtgaggctactactgatccatatacattaatattaacagtgttgcttaatgcgataggagaatatgaaaataataaaaataacgttagtgatttccacataacaccctctttttattgataaataagcgttgctgttattttggcggacaccgtccccggtgttgcattacctaatttactaaatgctcgtgttcttagtggaacagtaaccgatggtttaccattaaccgcgatatataaattttttccattacctaatggaatttcgccattactgtttttattttgtaattgaacggcaatattttttgccgtcccctcatttttatataaattattcacatctgcattatcaggagttccagaaaaagtcagctttacttgatttacccccggagaacaatctattaacttaatattaaaatcattccaaacagaactagagtttactttattaaataaactttctggcatctgtttcaaatcaatattaatatttttactaccagaaacattacaagtcgcggcttttatatttccagaaaattgaagtgtcacagtacttcctgcagatgaaaaaaaacttattccaatagtagttataagaaggaagagcctcattacttttatcattttactttcctacaggtagcaaacatcaatagctataaaaataaccatgtttgatatttaaattaattaatagcaagttacagtagttttatagagccctaaataatctggaatatcagatagatcataatttacctgacagctttcattgttgtatttaatagtaaagtttcctttctgttttagccctgataaataaacttctccatcattacctacaatactatttaactgactattgtctttaaaaatagcttgagcgccaaatggtactggctttttgttttccaaatttatcgtcattaatacacgatagcctacatttgctgaaaaattcgcttttactaaagcccctcgactcggtaaaaccgtctgactggtaagttccatttcagcattctctggcaatcttaatgtatcgatctcgacagtatttttacgatatggtgtgacataaggaactaatgcataccctgagttattagtcctaactcccgcttgatttaatatcgtaatatcacccgcattaggaatatctacgattgccgcggtttctcccagttgctgtccaaaaacaactccctgagaatgagcaacgacgctaccgctcacaccatagtaaagattatgattatctttgctataactgtacccccccgtaatatcacctagttggcctttgtaggatgcattgatatttccagaagatccttgatcttgattggtaaatgcttgttgcacactccaatttagtcgattatttaactgagatgccgatatacctacacttcctgtacttgaactattattgttactattcgcattaaaattataataaaaagtattatcaaatacgctaaagggcacattcaccgaaaaagccaacaaatgttcatcatcattttgtcttttctgatcagcaatataagaatgattaactgtatttttattgtaggtataatttattccatagctgataccttgccagctattattataaccaagtgttgctgattgttttttgcttttgctgttccaataatcctcttgtatatatccgatagctaaagagccatatttatcacctaaattttgattaagtgttatctccgcacgatgacggcgttgctcaatttcagggctataatgagtacgacgaaaactatcaaacacttcagataaactataaaagccactcgttgaatagcgataacctgctaaagcaatattggttcctatattgttcaaattcttattatatctaaaccgataagactgaccttgttgcttccttccatcattaaaagttgacttagcctgtgtaacatcaacagaaacagcaccaaatgagcctaaattcttcccaacacctagggagtaagattgataattttgactcaactgacttcccccataagcagtagtgccataaggtaaaccataaactaatgtaaactgaccaaacttcgttttatctacattattatcataagcacgatattcaccgcccgttacgctataagtgaaatgaccttcacgctgtaatacaggtaaagaggcgaaaggtacgatttgatgttgctcactaccattagcacccttaatcgtaacgtataaatccccactactacctgatggatataaatcattaatttcaaaagggccagctgccacttcagtttgataaatagtatatccattttgtttgatagttatttgcgagttactttttgcaatccctctaatgataggcgcatagcctcttaaactttctggatacatctcatcatctgttgataattgcatgcctcgaaacggaacactatcaaaaacatcagatgaagatatcccatcccctagtattaactgactttttattttatttatattcctagataaataggtataaagggtgttccacttccctgattgattacttgtactcgaccatgttgtgtagtttcttaaacgccatggtcctaaatttaaacctggtcttaaatttatataatttgaagttgtatttgaactgccattcttacgatcatagtttttagaaccactataactatagtttagtaataaggcatttataccattatcaatattatctaactctatatatcctcttgggtttttagataatgcaatttgcggaatacttaaatataacctttgtgaatcaaaatctaattcacttttagcttctggtatcgcagacaaattgacacagctagtatattcagaataaagcccaggataatctgttgttttaaccccaaagtcatttagatcatttactgataaacaaggtttaagctgattatttttatctttatcaaatctaatatttttagttaaaattaaattagtgttaacataaatatcaacataatagtcacctgctagctgttggttattctcaaaagaagataaatcaataatatctttatttggcagctctaaaaaatctggatcaaaatagatatcatctaaattattattttctgcatataataaagctgcatagcctaagtataaaatgaggctaatacataccttacttattttcatattagaaacctaattattatattctaacttcggataaatccacattagccccataatcattaataagctcccagcttataagaccatgttcattattatcatttatatcaaatgatttagttgaaaaaggtttagcataagaaacatcatcaaccaattttccattaaattttattgtttgaaaattcataaaataaggtgtgggattataaactatgactttccctctttcctttgaccaagataatttcttttgttcttcttcaaaattaacgtcttttagacttttaggtctatagatcaatttcatttgcgttttaaatgcaatttgtaatgaattttctgttttttctgtagcagggatcgtttttatatttaaccaaaaaagagattcttgatcacttggtagcccttcttctgttaaaaagatcctcaatgtattctctttatctggattcaatctaaataaaggtggcgtgatcgtaaattttgactgttttttttcctcaaaatcatctatccatgactggatcaaataaggcattttatctgggtttttcacgttaatgctgacattcttattgccttcattataaattacccttgtgccactaataataacacctgcataagatgtattaataataaataaagaaataaaaaatagaataatagacttcatattatcaccataaaatgattgtataataaggtttaaatccctttaaaccttatgacttacctagttatttttaattataattaatagtaaatgttgcattcgcatttgctaaacccgcagtgacagaatctgttttagcaatataacgagctctaaagtctaaattattttcaacaccttcttttaatggataagttttagatgcggtaaataaagggacaacagtatttgcatcatccgtaatttgaataccgacacctgttgccactcccgactcttgttttagcgcaataacagtatcgtctccagaataagactctgcatcaaatttaacagatgcagtacttactgttgcagggcaattaattaatttaatcgtaaatttagttgccgcagcagtaactccggcactaggtaatgctgttttagataccttacctaaattaacttttagagcatcagatccagctgctaattcacatgcgttatcgataatttctcctgtaaaatcgattgttccatctgcagctaatgcattattcgcgacaaaaatagacgttgtagcaatcaacattgcaataaagctttttctcatttatttctccaaataattattttaaacacattgagataatagaaataagattaattaactcaatacgcgagtattatctatttattatttgaaataaacaagtttcggttattacagtataatgttgataacattttaatattaaatagtgttattaactaataaaacacagtataagttaaacaatattttttacttttaataaatcttatttttaataatttgaaacaaaaataaaaacaaaaataaaaataaaatttttcttttttaaataaaatatttttttgtttttttttataactcatatagtgttaatcgtatattaatgttcaataaaaatgagttttctgattaaaataaaataaattctagctgtatataagctctaaatgcttatttaagcaacactatggctaaaaaacatcaatactatattctaaatacctgtataagttagtgatttactctaaagaaaagctaagaattttttcaaatttatataaaaagcattatttatcacaaaaatcacagttcgattgttttccaaccaaaaaaatatttactattcatctttaatgataaaaatcaaaaaccatgctttgtaaaaggaaatactttggtgtaaaactaaatttagtttttacttatatcgcattaagcaaaattttctgccacgtatctattaggaagcactatgaaatatcaagatgtaacaaaaaccccctgtgagaacgcttattttctagtctttaatcttattaactcatcggaaacccgccctactcttatcgacttttgtaataatctatcaggtcttcttcgtagtatgagaacccgtttccctgaattagacgtaagttgtgtgatgggatttggtgctgatgcatggtctaaactattccctaatcaagctaaaccgcgagaattaaatacctttaagcaaatcaacggcgatgtgtataccgcagtatcgacacctggcgatctgttttttcacatacgggcactaaaggtatccgcttgttatgaattagctgcaattattagccaaaaattaaactctattgccacctcagaagatgaagtacatggtttccgctattttgatggtcgctcaattattggctttgtggatggaacagaaaatcctgagtttgaagatgagcgtgtcgcttatgcggttattggtgatgaagatccactgtttaccggtggaagttatgcatttgtacaaaaatacattcatgatatggcggcttgggaaaaccaatctctcatcgagcaagaaaaagtgatcggtaggcataaattcaatgatgttgaactaactgatgaagaaaaagatccaggctcacacaatgtcgtcaccaatattcaagatgaaaacggtgatgatttaaaaatcgtacgagcaaatatgccgttttcaaatccctccaaaaatgaatatggtacctattttattggttatgctcgctatttctcaacaacaaaccgtatgttagaaaatatgtttgcaggaacacctgaaggacataccgataaactactaaaattcagtactcccgtcacgggcacattattttttgtcccatctccggcgtttttagatgatatagaataaaagttgattatcagtacaaacaaaaagttaatagcaatagctcatacactgctctatattcgataagaacaagaaagagctattgctattcaatatgatgacggcattaacttacaatattaagcgcctgatcagtcaaccaatacccgcaaaatagcacttccttgaaaactaccttcaacagggtttcttatatcattaggatgaaaggttgatgtgatagaaaatgttttcgcagcacctgcgttaagtttaaatttacctttatattcggtatcgttatatttcaactcacaagagccaccattaccacattttgtatagttttccgtttttccagaaacaggtgcacttcctattaatgaaacggatactgatgcatcataatcacacgttagttgatagttataaggcggggtaacattgttaatagattcttctggggtcatatttccatgagataagttaataacttggtttttaatattacatttacttgtgatactcacaggaatattaatataactattcatataaggcttcattgcattaccaaattgaagataacccgtactgttaccaccagaccctttattttcttcataagcccatgcaaaaggaatatttaaattatatgatcccggataagccgtcgctctggacaccgccacagttaatgacatagaacgatctaacggaagcactgcagaacctaatccccaaacggttccaacactatggcaaccactcggtgactgcttagcataataatttggccctacataaacctgattattgttattattggtacctgctagtgtccaagagagattggacaaataatagctcaatcctgatgaatgtttttgccaagtatttgtttgtggcaatctaatccaatagcggtaatttccttcttctgccattgagcctgaaccactacagtaagaagcgataacccgccaccctttaacctgaggtatggtcaccttaattacaccactggcgttagcatctgtcacattaagcgcaggggctgttgctgatgcagtactaccatttgacggtacatgcaaaaaattttgttgccagcctaccgcatatggtgtggctaaagaaaataaagctattcctattaatgtcttattcatttaaaccgtcctactttttaggattacataaacctcagtctctgatactcatcattgactctgttttaggtttagttataaacaatgcttaatgatgcggaggccgtaaaatttccaggagataaatcagcagtacctgttttaaaaggaacagcagtaatagtaaattggctcctgtcttgccctgtattagaaaaaccttttgtaatggcataacctcgaggggctgaaccattcaaacgcaaaggattattctcatcaacactctctccttgatataaggcaaggccaaatcgatttgaattcacgctatctgcggaaactttaagcacattatcaggcgctccagctaactgaatgccagatactttgacgtaaggtgagcccttaaaataagtacatgtaataggaatattttttgtgatagcgcttgtttgaccatcgactttataagtcattatttgattaaaagaaaactgtatagggatattattattaacaacacaaggtggaacataaatagcgcctgtaatagctatatttatatcaactgcccgtgcagttcctgatagtaaatataaaaaaataggcagtataaaatatttacttttattcataagaaacctcaaattctaccgtggcattataaactccaggtacaacacttttttcctgtattgcttttggtgtcgcttcaacaaatgcattaaaggtcagcaacatcgtgccatcgttaagttgagttccatttccaccgttatggttttcacctaaagtaatacgttggtttccatctatatcaattaatccaatggctaacttacttttattaacgccagatgaaagtgtaaggtacttttgttgttcagcccccatctctggctctggctgcccattaaatttaattttcactgatttccataacgattttgcatcacactggatcagtttaatggtaaatttttctgcaggtctaaccgcaggatatttccaataatcccttggtgtgctatttaaaaaaaccacattttgatttaaacttggctgatcaattctacatggcgtatcaatcaaagtaccatcaaaattcattgttgtagccgcatttgcaacaggtaaaaaaataagcataaaaaataatatttttacccattctctataaaaataaataaccatatgatctaccttaaattaattatactgcaatttaagagttaatatatttaacttccggtcaagaatatttctctttatttcatctgaaaagaggtaattcaaaataacattatctttataatgctttaatctattcattcttatatcaatattttctacgttatcgttgattttatttgtgaaacttaacacactagtaaacgcaggtttactatttgagctgtttttaaaatcactataaatattacaaccaccaataacgacatcaatatcttttatgtatagctcttttaaactaatttcattcgaaataagctcacaaggagcatttaaaaatgagccttttatatatataaaaccatgttgatttttttcattttgattataaaaatcaatttttgctctattaatattaaagaatgatttatctcgagcaacaggttctgcaaagccaatttgagaaataaaaaggccattaatgtaaagcatcaacataaaaataaattttctattcttcacctttctatctccaaaatcagtttttattttttctctgctacacaacgattagcttgacattgaaatttaattgtcggtcttccaccataatcatttatataagataagtatggcgttgagtacactttactattaaccctttgtgacgatttaggggcaatcatgactgcattaaactcagaatcaaccgcttctttctttgaaccaccaataccgaatacagtgacgtaataaggtgttggattctctatttcataaccgtcagatagcttatttaaaactaattgatcttgccaaatagcatttggctctctcaatatttgtttcggtctataaaacaattttatttttgtatgtaaggcaatttgtaatacattattgtcttcagctttaggtggaacttctctaacattaaaataaaataatgtttctctatcgttaggtaacttttcaatatctggtgtcgcagatactttaattaacgctttatcaccaggctctaatcgctgaactaatggtgtggcaattaatggccctagctcaattttttcattcttatcattttcaatccatgtttgggctaaataaggtaattgtttattatcattagtaatattaataactaatgcatttgacccaccttcgtatatagctcttgttctatctaaagaaattgctgcataggagtttgatgtaaccattaatcctaataataaaaatgatatttttttcatttcaagacctttgtcgtttattaattaccgatatttatttttcacacaataataatatcttattactcggttctattttatttggaagtttagcgacacattgttgttcagctccccaagatactctaatttcttcatttgggttaatacctgttagccaagcaaaaccatcatcactaattattcctagctctcgtcctttagcattactaattattgaaccaaatggtggataagagttatcagctaacctaattattgcaaaggccttctcaccttttaacacttcaaattttctataaccaatagcaccttcagttaatgaagattctacaatcgcctgtgtcgcttctatattattaggtaatttagttaaatcgatcgttgtttcattgcgataataactattaatatcggtaacaacaccataaccccaattattggttgttacacggccaccatcaactggtactcctgcaacaccttcagtatcaactaataagcgagtaccaccattaaatccatctgggtgaagtgctgctcctttagcggtaatcgttaagcccccattagcagaaaaaccaaatgatgaggtatttttatttgagatagtggcattcgcattaatattagcgattgaagtatagcgtccataatagccagagaagcttgaactactatccatatcatcgccatatgtcgttgaaacatttaaattataattagctaagttatcttcagtggtattaaagtaccctatattatgcgtatagttccccgaatttcttgagccatcataatttataaatcctctattattctctaatggaatactgactcttgcaaagaagacatcattatctttgccatagtatttagatctcgatgcagataaatttaatgaaatatttttaactgcaaaaacatccatatatttatttaagttaatagaataataatcggaattactttgatcccaatatgtctgatgattatattgcaccccaattgatgtgttatattcagaaagacctttattaaaggttactgtatagagttctttctcttttccagtaaaatcatcacgataacgtgcatctaaataattttgcatcgtcatataattacgttcattaaatcggtatccagcgaaggttacatccgcatccaaattatcaaaacgtttagagtaactgactcgccatgacttaccttgcatagtgccacgatcaggtaatcgagcataagattgtgtaatatcggcagataccgcaccgaaagcgaacatatcgcgcccaaccccaagtgctacactattataatcaccggcgaaaatggtaccaccatacatagtccaagcattacttaaaccaaaagcagcttcagtcgtaccaaatataggtccttctgtattatgtaatttatctctagagcgtcctgcaacaaccttataacgaacttgtcccggtcttgttaaataaggaacataggctgtatcaatttgaaatttattcgtctttccattttgctcaataatctcaacatccaatttaccacgcaccgaactgtctaaatcttgaatggcaaatggacctgcgggtactgttgaatcgtaaagaatacgtccttgatgcttaacaactacccttgcgttagtttcagcgatccctgtaacttgtggtgcatatccccttagttgaggagagagcatccgatcatcactttctaaactaatccccgtataacgccaggaattaaatatattggagtttataaagttttcaccgatggttaggttagactttaaactgcggatcgcgcgatatccataaactcgagtaaaatttaataaatctttattgttttccgcatcaccagaggttcgattataattcccttgataatcagaacgaatacgccagctaccgaagttataaccaacagtaccattgtaataaatactttgcgtattgcttccttcatgagggatattaacattggtgttaatattataatcaaggatcaaacctgagatcccatcatcccagcgagatggtggtaaccaagtagcacttgtatactcaagccatatttgaggtattttaattgataatataccttcatttaattttgttgtaacttcaacaccatctaggcttaataagtcaatacattttccatcattccatgttggtagattattttctattttttcctttaatcctaaagatgaaataatatcacctgttaaacaggcttgagataacagttttttattttcatcttgagatttattttctctttctaatacgttaacagtatatgttgatgaaccgatcccttgtccattaagtactaagttaagctgatatttacccggtaaaatataaccggcttcactaaacctagcaaagttaatattatctttagatttagagtcaacaacatctaagttaaactctacagaatatacattttgagaataaattataaataatatagttgccaaaatgcttgtagatcttccactcatattctctctgttcatattggctaataaccttaattatttaagtcttaaagttttaatgagaagttgaaagcagctaatcattcataatttattttgaataaaacgcttgcataataatcaccaggagtaattacatccaacttttttacaacgtctattttgtaatatagatatgtattatccccatcaacatatattaatggtaatgactctccagaattagcgctatatccatattcatctattattttaaaatagacttcatcactgttattaaatgaaaataaatcagctttagatccactaacatctgaataaaatgttaacgtaacgcctttcactttatcgatatttttagtcttattaataaattggcaatcagataattttatttttatttttttactcgctaataaatcatcattattgttcattttattaacaggtatagtacctagatcaaccaattgatatttactatccatatctaatgtgcaagcaggcgaaattacttttcctaaaaactttgctgttccttgccaccaaactttatctgatgggatatatttatccaatacagctccgcttgcatatgttgaaaagattttagtgaaaaataataatattatgatttttttaaacatagattttggccttaaataatcgagagcagattaactgctctcgttaaatttaatattttttattcataggctaatgtgaagtttgttgtagcgttaaactcaccttcagcaattgttccgtttgttgctttcttagcccaagctgtatacatcagcgtattatcattattacccagtgcttgtaattcacctgcttcattgaatttaaccattgaaccagttgttgttcctgaaataacaatagcagtccctgtattaccagttgttgctaactcttctgttgcaccagtaatagtatttccattaaaggttacttttacgcctttataagaacctgcagcaccagtatcagaaccggctttagttaaatcacaattaaccaatttaattgggatttgtttaacttgagaaataccatctttctctaataggcttttgctgatttgaccaaaatcgatagcttggttagcactttcggtagcaataccacaaggtgcatcaataactttaccagtgaaagtaatagtaccatcacctgaagccgcttgagcaacagtcgcagaaaaagccattgatgcaatagcgaacatcgctaatttattcaatttcatatttttacctttatatttaacgtaggaattaaagcgttaaaaaattaactatgatatatagttacacacattatcctcatcccatccagagatgatattgttacttccattacttttaaaaacttatgactatttaaatttttatataaaatttaaactgtatttatacagatgatataaatcatctaaacacgcaaatagaatggaaacgaatcactattttttaatttatgttttataatatctacgacaagaacttttcgataaaactcagaccagtcagcatccaataattttaatatcatatctaatgtttcaatattgatacttgttattccattttcatatcttgatatttgttgctgactcacatcaagtaattcgcctaattgggctcctgttagagatttacgtatacgagattctctaataaaatttccaatattcttccttaataataaagaatcagatcctctattcttatcgatattcatgaaaagccaccttcgtatatgtaaattaccacttactttattctcattaataaatttaaatagaaaaatttaaaatacgatttacatctgatttgcagagacaatagtttgcttatcaatttatgtaaacatgtttaaaacgatagataatcaaaatacgatagtttacaactattgtttgttaaatatttatctattttttgtttcatgcatgtagaaaaaaatgaataaattcaatagtaaaattacttagtctaaattcgttaataaatgcaattttacacgcactgcgtgttaattattttcacttaagttaaattaatttagtttactttaatttttgcgatatatttacaatcaaaaaaagagcatctcaataagataaaattaagtaattgatgtttttttaataattacaacgttcattttgcttaaaataacacggctatattgattagatatccccatcaaagtgggtaaaaattatgatgagaaaaatcggttttgctcaaattcgcaaatcaatttttttaaaatcatactaattcagatataaaaatagctggtgtctatctcaaaaataagattagtaacagggtttactgacaatgtcgattaaaaatcagacgaccaagcagaaaaagaagatgtaaaatgggttggataatgtgagaaaagacaatatgggggcttaaagataacgcccaataaaccatctgggcgtttaatcgtttcattatatcaagtcagatcattacttatttatttgcgtccttttttaaggtctcaaattgtgtttgatttaggccaaaatcgccaaatttaagtaacgcaggatcatggaagtcactaccgccactttttagcaaaccaaatttattagcatagttttgggtcagttcatagtcgataggtttcattctagaatgacttatttctaatcctttcaatccaaactggacatatttttctatttcatcatagttgtcatagacacatgggtgagcaagtataggaataccaccatcttgtaagatagcagcaattccttcatcaacagggatatatcccatttttaagtctgtttctatttttgttttagagccaaaaagttgtttataacgctctttggtcatttcctctggatatttttctctcaatgcttggaatatattcattttaaaaacgatattatattttgagaactttttcgcatcttcataacaaatatcgtagccttgttgattgagagataatattaattctcggtgaaactgatcacgacagttgagagtgttatcacacagcttgtcaacgttgggcgttttttcgttaagccaaagtcccactacatggacttttttataaacgtcaaagtcataacaactcatttcaacacctttgacgatatttaatccaagacgctccccttctcggtaaatttcgtcataatgattggtagtatcgtgatcggtgatcgcaatagtcttaatgccgtttctaaatgcattttcaaggacatcttttatttcacaaacaccatcactatggtttgtgtgaacatgtaaatcagcatagatcatgaagaagtacctctgttaattcttccattaaaaatagtcgcgcaataatcgttagttaccataagcttgttattcatattgttttaacccacggttagtaaaactgtattttggtcgacatgttttttatcggtctgaacaacgtctagcttattatcatcattagtaatgatgatcatcgttgttggatcatagcctgcggctattatcgcatctaaatcaaattcaattagcgtatcaccttttgtcaccttctgacctttaacgacacagcatgtgaagtgctgtcccgctaagttaacggtatcaatccccacatggatcagcatttcaatattgttaaccagtgttaagccaatcgcatgaccagaagaaaaggtaatatcaacaacgccatctgcaggtgcaatcacttttcctgttgtggggataattgccatgccaggtcccataatgccagaagcaaatgtttcatcattaacctctgaaagtgcaaccgttttaccttgtagaggtgaaattaacccaacaggtaatttactattcgctatttgtggttttttgttggttgatgcagcttgtttattattttcttcttcgtcacggattgggtcatcagtaggatcatcaaaaccaataataagcgttgcaataaaagtggctacactggcaatcaataaggtgattattgcatttaccacttggttatctgtatcagatatccacattggtaaacttaataaccccggagtgacatagacgaacgcttttaacttaacaataccagcaaataatcctgcaatagcaccaccaatcatacaagcgtacattggttttttcagtttgaggttaaccccatacatagcgggttcagttataccaccaaaaaaggcggtaatactggcagaaaaagctaattgttttaaggttttgtttttagtacgtacagaaacagctaaagaagcagcagcctgagacatattagaacatagcgccatcacacgaataatgggatcaaagcctttttgttccactaacataatactgacaggactaagtgctttatgcataccaatagatactaaccatggataaatagccactaataatggaatagcaataaaaccggtgtgctcttggattaagatcaccccatcagcaattaattgagcgaaccatgaagtgacaggaccgaccgcaatcaacgcaataggtgtcgaaactaaaatcaccaataaaggcaccataaatactttaaccatttctggcacaatacgaacaataaagcgttctatataagacatcatccaaacagtaattaaagcagggatcagttgagatgaatatttaaccaaagcgacaggaatatgcataaattcgacaggctcaccggctttaactaagcttgtccattcagggctgaccatcgctaaacagaccatcgcagctaaatattggttacaattaaatattttcgccgccgagaaaccaataaataccggcataaaatagaaggccgtattaaagataaagttaaggatataataggtttggtcacttttatccaaccaacctagcatcgttaatacaataagtaacactttccccataccggcacccgctaacagagggataaccggagcgatagagccagtaattgctgataatattttatttacgatagactgtttcttctggtctttattattatcatgaggagtattatttgtttttatcatttttgttagttcattaaatactttatcaacatcattaccgataaccagttgatattgtcctcccttcatcacatcagataatattttactatttgctttggcttttgaaggatcaattttatcttcattatgtaatgtaaaacgtaatcgagtcgagcagtgtactaatgactttatattatcctcgccaccaacaatagcgagaatttgttttgcaaattctttataattcatagcattgccttttatttattctgtaaaaataaattaaagatatatggatagagttggttatcgcctaaccaactaaatttaaatgatttattattacggcatattttttatttattcatctttttattatcctctgcaatttttgcaatatggattattagatataaaatttcattgtcatctaaggtgcaattatatttatctttaataaatttacttattttcaaacagcacatataaggttgatggtacttgtcttttattatatcgagtaactcattttctaaaggttcgtgatcattttcaggttgtgaaaataatcggatggagaaatagcgaaggtgtgtcacaaaacgacgataatttaacgatcctatgtcgtactctatatttaaataatatttgactatattagtaatgctttggataaagtgggtcactttgtaggtttgctgaatattatcgtttgttctaatactggcgatatgtaatgcaataaatcctgcttcatcttctggcattgaaatgttaaatctatcattaattaattttaagccataaagaccaatatcaaactcttcactataaaaattttttatctcccacaatattttatttcttataaaagtcccttctttataccgttcaatgctggcttgaatatggtcaatcaatgcaatatagatactatcttgtgtatctaaggtcattttttcttttgcatactgaataatattgtccgcaatttctacgtaatctaacgtaatattcgataaaagatcgagcactctctgcggacaatttttaggacttaagataaattttttggttatttgttcagatgttatctcatcacctacttttttggcgtaggcaatcccttttcccatgacgataatttctttttctgcttcatccagagagatcacaacactgttatttaatatttttttaattttcatgttcatctggcatgctcaaaaattttcttttattaaggcttaaaaacgcaaaaacccatttgtagacaaaaaatacttttcatctacaaatgggttttgtgtagtaagccaggtactattacaatccctacgtttactaggacgttaacatgggatatttatatcgtcaaacttagcacagtaaagttagtaatagatcacatatttatccgacttattaaaaaaagattgtttaaggtaagaacgataccggctgatggctttatatttaaatttataaccatatgataatattttataaaaaataaatatcctctagattagctccaacacttaaaaataacttttttatcagaaaaaatgacattaatatcattagtataagtttattttaatataataggtctatctaaaggtaaaaaatgttaaaaattagaatatcacgcccctcagaagcaccaaaaatcatacaaatctggaaaaattcagtcgatgctacacatgactttctgacagctgacgatcgccaagagattgaaaaagaagttatcggttttttttccgaaacaccggtatgggttgctactaatcaagaagactgcccactcggctttatgtttttacatgacggtcatctagaggcgctttttatcgatgcatcagcacgagggttagggataggaaaacagttaatatcacacgcattaactcttcatcctaatttaagcgttgatgtcaatgaacaaaatcagcaagccgtcggtttttatcagcatatgggctttcaaatatctggacgttcggagttggataatcaaggaagagcgtacccattattgcatctaagtagagctaagtaagacaataagaaaacataactattattatttttccaaaaaaataagccatcactcatacttttattggcaaagatatttagatgattaaagcaacacactgaaaccttatggtatgatgccgtattatgtttgtgaaataaaaccagatagagtttaacaaccaacactcacaaacgagataaacttcaatacgttaagaaagacgacaccatgactgacagccaaaatttcgaatcccacacccccatgatgcatgggtgtgttaacgttgatgtataacgatatttattgatttttcgaaaaaacatataatttaacctacacttaattaatcctttgatttataggtagttatttttttatttaacctagccagcgcttatactctaaataattcgaggtgcagctaggcgacaagtgaatgagtctctaagagcatacataagtatgtgactagtgcgaatgaacgtagtcaacaacgatgcaacttgaagtatgacgagtataaaatgaatagatatgatgtatctaatagcgaaggaaaatttgctgacggctctgatgaagaggtactggctaacaagctagggctttcaaacgttgatgatatcaatgatgctgagcttgtcctgttagaaaaactgtatcaagtcatttttgaagaacaatttcccactgagcaaattaccgtatcacttattcagcgttggcaccgccaatggctaggaaatgtttacgagtgggcaggtcaattacgcacggtgaatattagcaaaggtggctttatgtttgcccctgcgggacgtgttgcaaagttacttgctcaatttgaaaaagagcatctcacaaagtacacaccctgcaccaatatgagccgagaacaagccatagaagctattgccatagtacatgtggaattaattctgatacatccgtttagggaaggaaatgggcgcttatcgcgtttactcgcagatgtgatggcagtacaagctggtttccagccgttggattatgaaagttggactcaacaccccgaacagtacatcgcagcaatccacgctgggttaaacctgaactatgaccccatgaaatattgggttaatgaagccttaaaagaaaactaaatcgccagtttcaaatgtccaaacttctcacgcttcgctttcatctcttcttcaagacgacgagactcctgccctgtttcaatcgccgtagaggttgctaccgaacgaataagttgagtacgagttggtcttgttgcttgaattaattcgttctttttcatggtagtctcacttcaaactgacgataatgcattttatcaccgttgttttatatggcaacatagatcacttttctagttaaaaattttatagtgcaatgtctctttattttcgtctgctttgagcgataagcggacatattcactgaaaattattggaagccttttcttgcctagattggctttatctgtagattttcaagaaaatatgtaccgttatcgacacgcatatcaaaagccggaaatgagtcaaatgacgttttatctttcatgattcttttttttctgtgacttcaaaattttctttccgttgccgaactaggctgaaacttaactttccggccggaacggtgataatacccagacacgcaactattagaccgacgccagcccatcctataggtggcaatctttcaccgacgagcagaatggcaaggagcgcggctataatcggctccaacagagtgattgtggttgccatactggccggaatgcgcgcaagcccgtagccataacagacatacccaagaaacatcggaaccagtgccatataaataccgacggcggcattattccatgccattagtagcggcgctcctgttacaaaaagtacaggcataagtaaaataccgccagcaccaaaagtgacccccattgcggcgcgagaggctatcccgacctccattaaccgccgtgcagaccacgagtaaaaggcataggtgaagccagccaacagtcccagaaagatccccaccatggcatggtcatttgtggtactgcttccactactttctgccaagcagagtagcaccatgcctgtaacgccaacacccgctccgcacatccactgccgggtcaaacgaagagcgtcaagtcggtattcaatcagggcggacagaatcggcgcagagccaatggaaataaccgtacctaccgtaacacctgcattgtgcatggaagcataaaaagcgagagggtaaaccgctaccgccactgatccggtcagcgagaaataccagttctggataatcagagcacgctggcgaattattgttgtcgcagcgataataccctgtaatagcccaccaatccccatcgccacagctcctatggctaaaggactcagacctggggcatatgtcgcagcagtgccagtcgttccccagagaatagcggcgataagcacacctactatgccgccaagtcgctgtcccgaagaaatcattagtacatctccatcaactgttctgcaatattgctggcctgtttaacgcagttactgttaccttccagcccggctcgtgaaatgctgccttccagcagaaaggcaagatgtcttgccatacagtgtgcgctttcagcctttcccttcatcagttccattaaatgcgcaaccagaatcgcttccacctcttctttgtgctcacgaacggcctgacgacccggaactcctgcgggaagttcggctgccgcattcagaaggccgcagccgcgaaaaccgttctcataggcaaattcagcatgatcttcataagcatagaaaacagccattaccctctctttgggtgtcatggctagttccagccgggttttatacaacgaaagccattcttcatgccgaactctgagataggctgccaccaactcatctttggatgcaaagttgttgtacaggctttttttagcaacgccggctctttttactatggcgtcaattcctgtgccattaataccatgattataaaaaagaacacgtgcagcactgagcagtttttctcgggcagtttttgaaccttcagataaagatgtcatgatcagcctctttgtttatatgtaggtagaccagtatacctacttggaataccgaagcaacaaaagtctgcatttatcacaggcagtgcgatccttaataaggtggcctagcgaatagaatgaagtaaacaaggtagttatatgccgcgtcagtagcaatacgacatcagtcagcatgtttatatacgagaataaatgtccgcttctggcacagaactgccattcaaataagtatgattctgtgccgcggagaaagtacaaactaatcaaaaaaaattaattttaattcaactactaacagccatgcttcaacactatatccaaatatgggtgcttccaatcgccatcagacagcttacgcaagctcacaaatccatcatgttctaatgcacaaacaccgctgtgtgaactcacataatcatagactgcaccgctttctagtccttgaatcatatgggcaagcaactttcgcttcatctttttactatctttagtccatttttccactcaccgctatgtgacttcctccacgttgtgttaaatggatgtcctacagcatttgtaacacataacccatatccattcttctttcctgtctttagatactcgtcaagaagtaggtttaaactgtcacaaagttcttttgtttctaattcccaatgtttcagcatttctgatacataatcgtcggaatagagcttttgtagctttttcaccatacttcccttcgctgacaaactaacagagccagcattaaatatagtgccgtagcggatagttttaaccagcgcatcatcgacccctagcgtatctttgataaagtcggtttctaatacagatagtgaatcggtgctaattccatatttattgaattcttgctctagaataatcaattggcaccctttaatatcataattgtacccgttagctaaacatgcccatttcatcttgctgggtaaatattgaaaacctgtacctatctcaaaagaacggctccccactttggcggttttatacgcttgtcgatactcaacgattagtagcgttttgcatgctcattaacacaataacgctacactttcacagaacatcataaaaataagccatcaatcatacttttattggcaaagatatttagatgattaaagcaacacactgaaaccttatggtatgatgccgtattatgtttgtgaaataaaaccagatagagtttaacaaccaatactcacaaacgagatattcaatacgttaagaaagacgacaccatgactgacagccaaaatttcgaatcccacacccccatgatgcagcagtatcttaagcttaaggcagagcacccagaaatcttactgttttatcgtatgggtgacttttatgaactgttttttgatgatgctaaaaaagcctcacgcttattagatatttcattaacaaaacgaggtcagtcggcaggtcaacctattcctatggctggcgttcctcatcatgcggttgaaaattatctggctaaattagtgcaattgggggaatccgttgccatctgtgaacaaattggtgatccggccaccagcaaaggccctgttgagcgtaaagtgatccgtattgtcacaccaggcaccgttacggacgaagcgctacttgaagagcgccaagacaatctattagccgctatctggcaagataaaaatggcgcttttggctatgccactttagatattacctctggacgttttcgggtcactgaaatgccggatagcgaaagtatggctgccgagctgcaacgcactcacccagcagaactactctatccagaaacctttgagtcaatggcattaattgagcgtcagcaaggtttacgccgacgtccaatttgggagtttgagtgtgaaaccgccaaacaacaacttaatttacagtttggaacccgtgatttaactggatttggtgttgaaaatgcccgacttgcactttgtgccgcaggttgcttattacaatatgttaaagatacgcaacgcactgggttgcctcatattcgtagcattaccatggagcgtccgcaagataccattatcttagatgcagccactcgccgtaatttagaattaacccaaaatcttgctggcggttgtgataacacattggcatctgtacttgatctgtgcgtgaccccaatgggaagccgtatgctcaaacgttggatacacacccctttacgccagcgtgaacaattaattaaacgccaagatgcgattagcgccttacaacccctctattttgagttacagccttttttacgtcaggtgggggatttagagcgggtacttgctcgtttagcattgcgatccgctcgtcctcgtgacttatcacgtatgcgccatgcctttcaacaatatcaagatatccaccaagtgcttgatcaagcggatatgccctatattaaagaattacagcagcgtatcagccagtttgatgagttgcgtgaattactggaaaatgccattgttgaaacaccccccgtattagtacgggatgggggggtgatagcctctggttataatgcagaattagatgaatggcgagcactggctgacggtgcgagtgactatcttgaaaagcttgaagttcgtgaacgtgaaaaatggggtattgataccttaaaagttggctttaatggggttcatggttactacatacaagtcagtcgcggccaaagcaatttagttccaatgcactatgtgcgtcgtcaaacactgaaaaatgctgaacgctatattattcctgaactaaaagagtatgaagacaaggtattaacctctaaaggtaaagcattagcaattgaaaaaatgctctacgaagagcttttcgaaaaactattacctcatctaaccgccttacaaaccagtgctgaagcgttagctgaaaccgatgttctggctaatctcgctgagcgtgcagaatcactcaattatacacgccctgaattaacagaaaaaacaggtattcaaatcactggtggacgtcaccctgttgtagaacaagtactgagtgagccatttatctcaaatcctctacaactcgcgcctcaacgtcgtctactcattattaccggccctaatatggggggtaaaagtacctatatgcgtcaagcggcattaattacgctactggcttatattggtagttttgtgcccgcagaaaaagcggtaataggcccaattgatcgtatttttacccgcgtgggtgcctctgacgatctggcttcgggtcgttcaacatttatggtggaaatgacagaaaccgcaaatatccttcataatgccactgaaaacagtttagtgttaatggatgaaattggccgaggcacttctacttatgatgggctttctctcgcttgggcttgtgccgaaaatttagcgaatcgcattaaagcgatgacactctttgccacacactattttgaattaacgacactgccagaaaaactagaaggcactgccaatattcacttagatgcggtagagcatggggaaacaattgcctttatgcacagtgttcaagaaggtgcagccagtaaaagttatggtttagcggttgcggcattagctggtgtgccaaaagaggtgatccgccgtgcaaagcagaaattaaaagagctggaaaccctatcaggtcattcaggggcaagccatgtagaaacgtcacaactgatgttattagcagatattgagccttctgaagttgaattagcattaaataaaattgatccggattcattaacaccaaaacaagcgttggaattgctctatcacttaaaagagctaaataaataacaaaagaaaagccgattagttaatttaactaatcggcttgataacgcattgagcacctaaagcaactagttcatcttaaaaagtgcctctatgcataatccttgcccttgcagaatatcttttaaacgacgcaatccctcaacttggatctgacgaacccgctctcttgtcaaaccaatttctcgaccaacatcttctaatgtttcagcctcgtaacccagtaatccaaagcgacgcgctaatacttcacgctgttttggatttaattcaaataaccattttacgatattttccttgaggttattattttgaatggttgcttctggcccttcttcattttcgtctgaaataatatctagtaaggctttatctgaatccccaccaatcggtgtatcaacagaagaaatacgttcatttaaacgtagcattttgctgacatcatcgaccggtttatccagcgtttgcgcaatttcttcaacacttggctcatgatcgagcttatgtgctaattctcttgcggttcttaaatagacattgagttctttaacgatatgaatggggagacgaatagtgcgggtttggttcataatggcacgttcaatagtttgacgtatccaccatgtggcataggttgaaaaacgaaaccctttttcaggatcaaacttttcaacagcacgaataaggcctaaattaccttcttcaattaagtcaagaagagctaaccctcggttcgtataacggcgagatattttaacaactaaacgtagattactctctatcatccgttgtcttgatgggatatcacctcgtaacgctctacgagcaaagaatacttcttcttcagcactcaacaatggagaatagccaatttctcctaaatagagctgagttgcatctaacgcacgctgattgactccttcaatgagttcaatttcatcttgagcgtcagattcattttcagcctcttttgttgcggctgcttcatcgaactcttccatgttctcatcaatatcatcagtatataactcgtctactcttagcgtactttggctcatcagctgctcctacccttgataatttaggtaaacgacgctcttaatgagatcgatttaccagtttatcgctgtgtcacgacacaacgggtttactgattttcccttgtaacgaattacaaaataaaaaaataacataatctgttttactgttaatttactttatagtttattcaatatatttattaactataagtattagttattaacagcaattattattattttacgtatatttatctatacgtatattcactgtttaacaagcaatatgtgacaatgtacatcaaaaaaaagataaacaaaaatccgcaataataaaataatattcaataatatatattattctaaagataagacaaaaaacaaacctataataaaaacaataagttaattcaatacactatctttgaatacattagatttttattcatacttttaactaacgttttttagcatactcattcattgttcgataatcaacagtctaatttaatcttatctataatttgacagaaatatctcattttgcttacgttacaactaagcaatcttacttagtgaaagaaatttattttcaaggttttaattaatttaataactaaaaaagcccttttgttaatattaacaaaagggcttaattttcagattattcactaacaacgttaagcgtttatttatcttttaggtaaatagctcattgggttaagtgatttttctttataacggatctcaaagtgtaatcgaacagaactagtaccagtacttcccatggtcgcaatttgctgtcctgcatttacattttgctgttcacgtaccaagattgtatcgttatgagcataagcactgagatattcatcattatgtttaatgataactaaattaccataacctcgtaatgcgctccctgcataaaccactttacctgcggctgttgccacaatgggtgagcctcgtgtaccactaatatcaatacctttattaccaccaggtgcatttgagtagctctcaataattttaccttgtgctggccatacccatttacctgttgcggctgcaggtttagaggttgccgttgtgttattactggttgttgccgaagttgttggtgtcgaagtcgttgtctttggcggtgtcgttgttgttggtttcgtgatcaacggccccattgagctattattatttgacggcttagtttgtgccgtctgaacgccttcactacttggtttattaattactgaagtatttacattggtattggtaccggtattaacttgacggttaccaatcttaagtacttgtccaacatttaagctatatggctctggaatattgttcatcgaggccaaatcttttacatcactatccgtgatccacgcaatataaaacattgtatcgccacgtttaaccgtataagtgttaccgctgtaattccctttagggatattgtcataattacggttatacacaatgcgtccgctaccatccgtattgatattttgaggggtaacattttgcgtacgaggctggctttgaggctgcgcggttgtgttattcactctaatagaaggaggaggcgttgtttgtaacggagttgaacctctttcaataggtgttgccactcctgcattactgttagttgtaacaggtgatgtagaaacggtacgatttgacgaactatcattgacagaggttatcggtgcaggacgataaggcgtgtcggcacagcctgttaatgcaaatccgattaccgaacacatgattgcccagcggacatgcttaattgggctttctgaattcatacttccttctcccttttaaaaggcattagcgtctagcaatttgttgagtaacacaaagagactgcaattttttgaaaatatttcatttattagtgcagattacgacaagctacaaaaaagcagtaataaaaaatggtcagatttatctggaagttatgctaactcacccgcaattagggggacaaagcgtacagcctcgatagattgatagtgaaaatcattacctaaacgacgaataaacttaagcatctgctgctgttcaccgacaggaatgatcatcctgccaccatcagctaattgcatcaagagtcgttgcggtacttctgttgcacaggcagtaacaataatagcattaaaggggccttttgatacccaaccttcccaaccatcgccatgacgagtcgatatattatgtaaatcaaggtgtttaaagcgtcgttttgcctgccactgcaatatttttatccgttcaactgaacttacatgatgcactaagtttgctaatactgcagtttgataaccagagcctgtgccaatctctaacacagaatccgttgcttgtaattcaagcagtgatgtcattttagcaacaatataaggctgtgaaatagtttgaccattaccaataggtaaagccgtattttcataagccttatgggagagcgcttcatcaataaatagctctcggggtactttgctcatagcttccaacagacgctcatcattgatgccgtgttgttttaacattgtcagtaagtctttcattgaccgacttaacatgttttttcgacctctgctttatttaaccaatcttttaataactcaagcgctttatacgctgttgaatcaacatgtaatggtgtgatggagacataacctgcatcaaccgctgcaaaatctgtatccggccccacatcatttttttcgccaggaggcccgatccaataaagggtatttccttttggatctgtttgtgtataaacatgttgtgaagcatgacgacttccacaacgtgttatacgaaaacctttgatctccgctaacggaatatcaggcacattaatatttaaaatattcccagctcttaaaggcactcgttgtagcatagctaaaacatcacaagtcacttgggctgctgtgtcaaaatgcgtttcgccatcaagtgataccgcaatcgcaggtaaacctaagaaccggccctctgtagcggcagcaaccgtacctgagtaaagcacatcatcccctaaattagggccatgattaatgccagacaccacaatatctggacgcggtctgacgagatggttaacaccgagatagacacaatccgtgggtgtaccttcaactatcgcaatatcaccattttcatgtcgctgtttacgtaacggtctatcaatagttaatgaattggatgctgcactacgattgcgatccggtgcgacaatttgtacatcataacgctggcgtaaggcttttgcgagtgtctgtatcccttttgccataacaccatcgtcattactcactaatattttcagcatcaatattccctaataatatcaattcacggacaacgctagtggcaaaacttcctgctggcaaaaagaacgataaagaaaccgtagtatcatctaaccaatgccatgacatattttctggtagcaaattaatcgcacggcgagtggtatcaactcgctcttgttgtgctaatgaccataatgcttcgtagtcagctaagttgtcggtttcaaatatcagtgcttgtgcttgtgtacctaagtcacctttacccggcaatggagcggtaatatgtatatcatgctcttcatagcgtgtttgtatttgggcaagttccgctccttctgccacaaaccaacttcttttaccgtgcaattgcatcgcatcaccacaaagcacttgagtataaatatgacgctcaagtcgttggctcaccagatgattaaacatcgcactacgtgcagctgagagataaaagctacgtttgctacgctcttttacccgaatttcattggttgcccaacgccatgcttggcgtaaattgtcgccattacgaccaaagcgttgcacaccaaaatagttaggaaccccttgtttttgtatctctactagacgagtttccaccgatgtcacatcggagatatcacgtaatactaaggtgaaatggttcccttttaatgtcccaatacgtagcttacgttgctggcgggtggttgttaatatttcgcaaccttctaacgtaaattgactaaagtcgggcatctctttacccggcatacgcaaacaaaaccattgttccgtaaccgcatttctgtctttaagcccagcataactagcatctcgaggatgaataccggcaaatttagctaacttttcagccacaaaagccgtattacaacctgtttttctgactctaaccatcacgtgttcgccttcaccatctaaggtaaagccgagatcttcgctgaccttaaaatcttctggtgtcgattttaatcgccctgtcgctgtcggtttgccatgtagccaatgaagttctggtaaatcactcattaagataaagactctttgattaataacaccaccgcttcacaagcgataccttctttgcgtcctacaaaacctaatttctcagtagtggtcgctttaacattgatatcatcgacatgacaatggagatcttcagcaatattgacacgcatttgtggagtatgaggtagcattttaggtgcctgagcaataatagtgacatcaagattaccaatacggtaacctttagccatcactcttgaaaaggcttcacgcaataatactcggctatccgcacctttataagccggatcggtatcaggaaataacgtaccaatatcgcccatcgcaacagcacctaaaatggcatctgtcaccgcatgtagtaccacatcaccatctgaatgggctaggagaccttgttcataaggaattctcacaccaccaataataattgggccttctccgccaaatttatgtacatcataaccgtgtccaattctcatattatgtgttccttatgctggtaatttgtcgagagaggaaaaattctgcaagagccaagtcttctggttgtgtgacttttatattatccgcacggcctttaactaataagggttcatatccaccaaattccatcgcagatgcttcatcagtaatgggtacgttttgtgccaatgcgttttcaagattttgttttaacaaggccgctgggaaaaattgtggcgttaaagcatgccatagcgtgtctcttgccactgttttttcaatatggttatcttgttgatgactacgtttcatcgtatcacgcacaggagaggctaagatcccaccacaaaattgaggatcaagatggttatcatcaatgagttgaataagattatccaaatcactaaaggacaggcagggtcttgccgcatcatgaactagcgcccatgtattttgcgcaagatgttctgtaatatagcgaagccctgataataccgaatcagcacgttgtccccctcctttaacgacaataattcgtttatctttagcaagagctaggtgataaaaatagtcatcttctgggttaattgcgacaataatttgcgaaatgcgtggatgttttaatagcgcattaatagtatgttcaaggatagtcaatctgccaattttaaggtattgcttcgggcaggttgcttgcattcgactacctatgccagcagcgggaataaccgccacaataggaaaagtagagtttggtatattcattatagtatttatatcaaggcacactattaattcaacaaattaacgacgtggttgggatttatcattaacaatacgataaaagctttcattaggctttatcatgccaagttcactacgagcacgctcatctaacgcttcttgcccgccattgaggtcatcaatctccgcaaataagcgatcattacgcgactttaattgtgcgttttgcgctaatgcagattcaacttcttgacttactttgttgtaatcgtgaataccatttttacctaaccacaatgaatattgtagaaaaccaagtaagatcagaagtaagactgttaatttccccattaccacccccaaaatgaatgggctaatcatcccacaactctcccatctgcgccacaaaagcgcgcagatatattacatgaatattcgtattccccccacccttaacataaacaatcacgctatttttcagataaagtataagttgtatgcttaaaagcgcgtttttatctgcagaagtggtaagtaaagaagtggtatttacactgtatttgccgccaaatcagtttattaaaaaaacccttctatccctacatattttcccagataagagaaaatgatgtagagatatgattagcggtaaatttgttgttgctgtaaataagcgaggatttgttgtgtaagctcattaatcgcgagtgagccgtctaaatgaatttctggcgcagtgggtggttcataaggtgaatcaatgccggaaaactgtttgatctctcctcgtcgtgctttttgatagaggcctttaggatcacgtgcttcacaaagggctaaaggtgtatcaacaaagatctcaataaatcgcccttgagcaaacctttctcttacttgttgtctatcttgctgataaggagaaataaatgctgttaagacaattaatccggcatcgaccattagtttagccacttcccctacacggcgaatattttcatgcctatcttgttcactaaacccaagatcatggcataaaccatggcgtagattatcaccatctaataaataggtgcggataggcgcatggagtgtcgagtactgatataaggtttgctctagcgcatcagccagtgttgatttacctgagccagataacccagtaaaccaaagtacacatcctttgtgtacctgttgtgcttcacgctcttttaaccctatttgatgaggatgccagacaatatcttgatgtatcgtcactattttcctcccagtaagtctcttgcgccccaatgcggaaaatggcggcggatcaactgattgagttcaatttcaaatgcatcgtattgggaagttgtgggttgcacgttgtcgcgaatttctcgaataagaccagcacccaccgtgacattgcttaatctatcaataaaaataagccctcctgtttgtgcattaagttgatagttatccagcaccaatggctcttcaaataacacttcaacatgcccaatggcatttagcgctaaactttcggtcacttgttgagtgagcttatccacatcaacttgatagtgaatattctctattttggcacgactttttttgcccgctactttgatatcaagggtttgcccctgtactaacggttgttctgacatccatacgatatccaccaacgcatgattgctaacattagcagtagtatcgttagcatcaacaataatgtcgccacgactaatatcgatttcatccgctaacaccagtgtaatcgcttgacccacttgcgcctgagtcagatcgccatcaaaagtcacaatacgtttaatggttgaacgctgtcctgagggtaatactttgatctgttgtccttgataaagagagcctgatgaaactgtgccactgtagcctctaaaatctaaatcaggacgattcacatactgtacaggaaaacgcaatctttgagatttagcccctaatttaaatttaaccggcgcatcttcaagtaatgccaacagtgtttctcctgtataccaaggcatatttaatgaaggagatactacattatctccctccagtgcagagataggcacaaattcgatagtgagatcgcgcggtaattgttgtgcaaagtgcaggtaatcttgttggatcgactcaaagatctcttgttgataatcaagtagatccattttattaatcgcgaccactaagtgacggatcccaaggagtgtgctaataaaactatggcggcgagtttgctcttgtaccccttttcgagcatcgatcagcagaatagaaagcgtactcgttgatgctcctgtcgccatattgcgggtatattgtgcatgtcccggcgtatcggcaataataaattttcgtttggctgttgaaaaatagcgataagctacatcaatagtgatcccttgctctcgttcagccgctaaaccgtccaccagcaaagcgagatctaatttttcaccttgagtaccaatctttttactttcgttttgtaaggtggagagctgatcttcgtagatctgccgcgtatcatgaagtaagcgaccaattaaggtgctttttccgtcatcaacattgccacaggttaaaaaacgtaataaccctttgttctgttgtgtttttaaataattttctacaccacctgattgtgctatttcaccggcgatcagttggttggttttgatggctgcaagtcccatagtgactcctattaaaaataaccctgacgttttttaagttccattgaagcagactgatcactgtcaattaaacgcccttgtcgctcgctactggtggaaattaacatctcttcaataatggcgggtaatgtgtctgcttgtgaaggaatagcacccgttaatggccagcagcctaatgttctaaagcgtactttttgttgtgtgatcacctctccagcttttaggtcgattcgatcatcgtcaaccataatcaaggtaccatcccgctcaatgactggacggtgtttagcgaaatagagcggcacaatatcgatattttctaaatagatatattgccaaatatctagctccgtccaatttgataatggaaaaacgcgaatactttcccctttattaatttggccgttgtagttttgccataattctggacgttgatttttcggatcccaacgatgagatctatctctaaatgagtaaatacgctctttagcacgcgatttttcttcatcacgacgcgccccaccaaatgcggcatcaaaaccatatttatccagagcttgcttaagaccttctgttttcatgatatctgtatgcttggcgctaccatgaataaagggattgatccccaattgtgccccttggggattacgataaactttgagatcaaaaccatactctttggccgttttatcgcgaaactcatacatctcacgaaatttccaacccgtatcaacatgtaaaagaggaaaaggtaatttcgccggataaaaagccttacgtgctagatgcaacatcaccgaagaatctttgcctattgagtaaagcatgacgggattttcaaattcagcgacaacttcacgcagtatataaatgctttctgcttctaattgctgaagatgggttaattgtgtttcattcataacaacctcgtttaggcaaaatgaaccaaagatgagtggatggcagaggtatgttgagtttgtctatcaccaaaccacgcaagttggtgatgtaatgcagcaacttctccaacgattaataatgccggggtgggagcttgcttagctaattgcgctaattgtgttaaatttcccgttaagatctgttgatcatggcgtgtaccgcaactaatgacggcaataggggtgagtggtgaacgaccttgctctattaaacgctggctaataagttctgctttcgtcgttcccatataaattgctaacgtatgattagcttgcgctaaagcttgccaatctggctctatcccccctgattggcaatgcccagtcataaaagtgacactttgcgcatagttacgatgagttaatggaatacccgcataagcactggccccactagctgcggtaacaccgggaacaacttgaaaaggaatgccatgttgtaccgcaatttcaagctcttctcctccgcgtccaaaaataaaaggatcgcccccttttagtctgacaactcgtttaccaagctgagtatatttcacgatcaattgattgatttcttcttgcaacgtactgtgttgccccgctcttttacccacacaaattctatcagcatcacggcgcaccagttctaagatatctgcactgactaaactgtcataaagtaccacctcggcctgctggataacttgcaaacctcgtaaggttaataacccggcatcacccggcccagctcccactaaagcaagctcaccttgtgggctatctggatgagacagttgttgttcgagctgtgcttgcgcttgtattaattgaccacttgccactaatgaggcaaatttgccgctaaacgcttgctcccagaaacggcaacgtgcttgaaaaccagtcagtttttgtttcactttattgcgccatttccccgcaatagtcgccatagtccctaatgaggtaggcaataatgcctctagcttttcccgtatcatacgaactaaaacaggggctttgcccgctgatgaaatggcaattaatatcggatttctatcgataatggcaggaaagataaaagagcattggggttgagagtcgacgacattgacaaaaatgtggcgtgcttgcgcatctagatacacttgttgatttaataccttatcgtctgttgccacgatcaccaacatcatgccaagtaaatgctctgcctgatattgcccagcaatccactcaatttgattttgctgataagcaagatgcaattcatcacataactgtggcgcgataacacgtaaccgagcgcccgcttttaataacagtacggctttacgcgcagcgacatgcccaccgccaaccagtaatactgggtgctgttttaattccacaaataagggtaggtaatccatacgcgtatctcacatttttattgtttacttatatgaataacgactataaaaggtgcattcggggttatgaaatgacaaaaagctatgtgatggaacagaaaggaataagcaaaaatataataatttcaaatggttattattttactcacgacaaagagggcaacagatgactctattgcccactcaaaataaatagcgatattaataatgaataataatattattcgtgtaatccacactcacgttttaagccaaagaatcgcgtctcttcttcactcattccctcttgccatttgcgtgtcgtatgcgtatcacccacagacagataaccttgttcccataatggatggtaaggtaaattatgctgtttaagatattgataaatttgtttattatcccaatcgactatcggtagtaacttaaaaatacctttcgctatggataaaacaggtaaatgctctcgactttttgattgctggcgtcgtagccctgcaaaccatgtcttcgcctgtaactcctttaatgccttttccattggcgcaactttatttatttggttataacgttcgataccttcaatcccttgcaaccaaagtttgccgtagcgtgcttcttgccaagatgaagatatttcagcgcgatatacttttaaattaagttgtagtgaagaggttaattcatcaataaattgatatgtttcgggaaagagataacctgtgtctgtcaaaattacaggtatatcgggatattgtctggtgagcaaatgcaaacaaactgccgcttgaataccaaaacttgagcttaaaacaaactggttaggaagatgttctaaagcccaaatcacccgctctatcgccgttttttgctctaattgttggttgatttcatcaagcgccagtcgctgctcttcaatcgatagcaacaccaactgagaaagtgataatcgactcatatcacctcctgcacttcataaaaatcaatggctgaattaacaacgggtttgataacatcagtgcgaataagaaaatcaccaaaaccttcatttaattcacgtgaaatagcccactgaccaattaaagtatcaagaatttcaatgatttcttgtgatgaaatattttcacgatacattctaggaatgcgagtacccatgcggtttcctcctagatgtaagttatagcgatcgggggctttacccaccagtccgacttccgccaacatcgcacgaccacaaccgttaggacaccctgttacacgtacaacaatatgctcatcactgactccgtatttagccatgatattatcaagggtatcggtaaatgcgggaaggaaacgctccgcttctgccatggctaatgggcaagttggaaatgaaacacacgccatggcatgtttacgcagcggtgtaacctcatcattaattaaaccatattgacgcgctatcgcctcaatctgctctttctgtgcctctggtacaccagcaacaatcaaattttgattagctgttaaacgaaagtcaccaagatgcactttggcaatttcagcaacccccgtttttaacggcgcattaggtttatcgattaatcgaccactttcaataaataaggttagataccatttgttatcaaccccttttaaccaaccaatttgatcaccacggtgagtaaattgatacggtcggatcatatcaaacataacgcctgagcgacgttcaacttcctgtttaaatgtttcaataccaacacgctctaaggtgtatttggttttggcatttttacgttcagtacgattgccccaatctcgttgcgtcgtcacaatcgcttcagcgactgctaatgttttatcaataggaatataaccaaattcactagctaaacgcggaaaggtttttttatcaccatgggtcatcgcaaggccgccaccgactagcacattaaaaccaaccaaatgcccattttctgcgatggcaataaaattcatgtcattggcatgcaagtcaacatcgttataaggggggatcaccaccgatgttttaaatttccgaggtaaataggtttcacctaaaataggctcctcatccgttgtcgccactttctctttatctaaccaaatttctgcataggcatgggtgcgtggcaataaatgctcggatagttttttggcccattcataagcttcttgatgcaatgaagattgttcagggtttgaggtacatagcacatttcgattaacatcattggcggttgcaagagcatcaaggcctgttgacgctagcatttggtgagccggtttaacatgaccttttaaaatgccatgaaattgaaaagtttgacgattagtaatacgaatactgccatagagcgtattttcactagcaaacttatcgatacttagccactgctttggtgtgatgacaccgcccggtaaacgacaacgtaacatcatggcatgacgaggctctagtagctgttgggcacgctcggcacgaatatctctatcatcttgttggtacataccgtgaaaacgaattaataaaaaattatcgccctcaaaaccaccggttagaccattttgtagatcatcactaatagtgcctcgtaagaaattactctcttttttcatacgttcactatcagatagttttccttcaaccactaagggcgcttgagtttgtgatttcattttaataaacatccctctgataacgacgtgctaaacgtagctcacttaaataatcatctgcttgttcaatatttttattgccatgggtcattactatttctaacaatgtttgttcaacatctttagccattcttgatgcatcaccacaaacgtagagataagcaccttgctgtaaccattgccaaatttcctgaccttgctcccgtaatttatcttgcacataaattttatcggcttgatcacgcgaccatgctaaatcaatacgtgttaacaacccgcttttgacataacgttgccattccacttgataaaggaaatcttctacaaaatgaggattgccaaaaaagagccagtttttccccgtcgcaccttcactttcacgttgttgcataaaccctctaaaaggcgcaatccccgtccccgggccaatcataatcacagggacttgattatcttcaggtaaacgaaaatgatcattacgttcaataaaaacgtttactgtatcgccttcttgaagttgatcagctaagaaccctgaggcacctcctgtataagcacgctgatcgacgttataacgaacaacacctaaggtaagatgaacttcatcatcaacttcttgttgtgatgaagcgatggagtaaagacgtggagttaatgggcgcaatatatcaataaactcttgagcattaggttgcgcactatattgacgtaccatttcattaattgggtaggtttgcgcatattgctgaagtttgcttttatcagccaccagcgataataactcttcgtggcgggataattgggcatacgctttaataattggtgcactattttgagttaattcaacatgatgcaataatgcttcttttaacgttaatgtttgtgatttaacatttacctgctcatcccccgttaaccataatagggtaataagctcatccactttttcttccgaattcttaaaccatactcctagtgcatctccgggaagatattgcaattcagagcctgctagactgatttcaatatgacggatatctttatctgaatgtcgaccggtgatcttctgattagttaataaagtggcactaaaaggtgcatcacgatggtagcgtgcggtatcgacactgtcggttgttcctgattgtgtttgttgtaatacttgagtgttttgctcaggtatacgtatttttaaaatatcagtcagctgagttatccatttatcagcgtcagcttgataatcaacatctgcatctaatctttctaatagactggtcgcgccaagttgcgccaattgatgatcaaaatctttacctgcttggcaaaaatgttcatagctactatcgccgagactcagtacagcataagccgtttgcttcattggcgcggcttttttagagtgcaaatatttataaaatgtgatggcttcttcaggaggttcaccttccccctgtgttgaggtaataataattaaggttgtcgttttgtggatctgcttaaatttatattcactcgcactatagagctcaacattaagttgattaccaaccaatttatcgcgtaattgttcagctaaacgacgtgcattgccagtttgtgatgctgatatcacggtgatggtttcttgttggggaacctgactttgtacacttaccagttcatctttagtggatgaatgctgattgaattgcccccaaaaatagccagaaagccaagcaaattgggctggagttaagtctttcgtcacatcctgtaatttattcaattgctcctgtgttaatggaagcattgataataatgggggttgattgctcatcgatcctgccttaaaaaaacattgcactgcatcggtgctgttattgtggttggacttttttaatgaataagagggtatcgcacgatcagagcacgacttaaagactggtttgctctatctaataaccttaaagactaaatttatttaccgatttcctttatcgatataatgaataaacgaaaaagaatataataagtcgctaaggttaagcgattaggcgtaacacactaaatcagatacactaaatagacaccgttttatctgtatttttttactatttaagtcaagagagttttgatgataaccaccatctttaaagattttcagtttgaagctgcgcaccacttaccccatgttcccaaaggccataaatgtggacgtttacatgggcattcatttttagtgagattagaaatcactggtgaagtagatgcgcagtcaggttggctaattgattttgctgatgtgaaagccgcatttaaaccgactcttgataggctcgaccactattatcttaatgacattgaagggttagaaaatccaaccagcgaagtactggcaaaatggatttggcaacaagttaaaccatcactccccctgttatccgccgtgatggttaaagagacatgtaccgcaggatgtatttatcgtggtgagtaattttcacctaaaaaaatcagccactcataggctgattttttttaacgataaatgacacactaggcgatatttaaatatttatgtgtttgcattgaaaaacgccaattacgctcaatacaggttttaatacataacgctgttgcactctctttacaactgattggttgtaaggcaacgatcgccataggttgttgagttcttaatcgcagtaaatcatccagtgcttcgatatctttttcacgagcaacagggtgtttaatttcattggcacgattaatcgcactagataaaacactcaatccacctcgcataccaactttcggcgaaagtgttacccatgttgcttcactacagaggatgtcatgcgtgccactggtttctatttggcaatcaaaacctgctttttctaagccttccgtcaacggccgtaagtcataaaggcaaggttcacctcccgttatcaccacatgctttgcgctataacgttgttgccggaaaagtgataaaatatcttcgacagtggctataccccaagtatcactttcttgtgttttaatgggaatatctccaagagggactttcttgctctcttctttttcccaagtatgtttggtatcacaccaactacatcctacagggcatccctgtaatcgaacaaaaagcgcaggaacgccagtaaaaacaccttcaccttgcaaggtttgaaacacttcattaatggggtattgcataagaaactctgatatccaatgaatgctgatgattattacagataactgtctcaccgtaagaggctttatgataaggtacatgctttgttttggatagctaacgtgcgaaaagacactgaaaaaaagagagccgatttttcggttggacagagatgggaaacactttagatgcaaaaagagaataaactttcacgaggactatcagggcggcatattcgtttcatggcgctaggctctgctattgggacagggcttttttatggttcagccgcggcgattgaaaaagcaggccccgctgtacttcttgcttatcttattggtggtgccgcagtatttatggttatgcgcgcattaggggaaatggcagtccatcatccagtggcgggttctttttcacaatatgctagccattatatgggaccattagccggatttttaactggctggaactacgtttttgaaatgcttatcgtttgtcttgcagacgtaaccgcatttggtttttatatgaaactttggtttcccgatgtcgaccaatggatatgggtattaggcatagtctgttttattggtgccttaaatttatgtcatgtgaagatatttggtgaaatggaattttggctctctatcgttaaagtgactgcgattattgccatgattatcggtggtgttgccataatgatctacggctttggtcagcaaacagaacatccaattggtatttctaacctatgggagtttggtggctttatgccaaatggtatagaaggcattattgcctcactcgccattgtgatgtttgcatttgggggtattgaggttattggtattaccgccagtgaagctaaagatccagaaaaaacgatccctaaagctatcaatgcggtgccatttcgtatcttactattctatgtactgaccatttttattttaatgtgcatcttcccatggcaacaaattggccataacggtagtccatttgtacaaattttttccaatctgggtatcaattcagccgctaacattcttaatcttgtggtgatcaccgccgctatctctgccataaacagtgatattttcggtgctggtcgcatgatgtacggcatggcacaagaagggcaagcacctaaatcctttatgaaactgacgcgtaacggtgtgccttggatgaccgtattagtgatgtcagtagtgctattattaggggttgtgcttaactatcttattccagaaaaaatcttcgtacttattgcctctatcgcgacatttgccactgtatgggtctggttgatgatcttactttctcaagtggctatgcgtcgccaaatgagtgctgaagaggcgaaaaaactaaaattccctgtaccattttggccaatagcacccgccattaccattatttttatggcatttgtgatagcaattttaggctactttgaatcaacccgaatggcattaatcgttgggttagtatgggtggctattttaactgttggttactatattggtatcaaaccaagaataacgcagaaataatctactgttatcaagaaaaataaaggctgtgagtcattcacagccttttctttatccattatctgcgctcaatataattaggctagcgcttgggttaaatcagcaattaaatcatcaacgtcttcaagaccgattgataaacgaattaatccatcactaataccatggcgttgacgctcttgtgcactgtatgtcgcatgagtcatagtcgcaggatgctgagccaatgattcacaatcacctaaactcaccgctcgagtaaaaagcattaagcgattaagaaattctctgccagcttttattccaccattcaactccatacttatcatgccaccaggtaacgccatctgctttttggcaagttcatattgaggaaaagagtttaatccgggatatgaaatcgttgccaccttaggatgattttcaagaaattgcgcaatacgctgcgcattctggcaaattttttccattctaatgctaagcgtttttatccctcttaagacgagtgctgcatcatgaggtgataaacaagcccccgtcatatcttttaagccctcaacgcgaattttatctgctaattgataattagtgataattgcgcccgccatcacatcaccatgacctgataaatatttagtcatagaatgtacgacaatatccgcgcctaaggttagtggcttttgtaaataaggcgaacagtaagtactatcaaccatgactaaaacatcatgttggtgcgcaatattagcgatcttttcaatatcactaacccgcatattaggattagccggtgtttcaaagaaaataagctttgttctatctgtaattgcttcggctaatttttcaggatcggttaaatcaacatgtttgatagtgataccaaatttagccagcccatgattaaagaaagtaaaagtacaaccataaacggtcatatcagcaatgagttcatctcctggctgcaataatgaccaacatgttgaagtgatagctcccataccggaagaaaaaacaacagaagcgtctccttgctctaactgagctaatcgtttttctaataaatccaatgtagggttagatatacgagtataaaaatgccctttttctttcccagcaaaacaatcagcaccatattgagccgtgggaaatgcaaaagtggacgtttgaaaaacaggaggcaccaatgccccctgataatctaacggagagtagccataatgtattgcttgagtattaaaacacttattactttgcgtcattatatctccttgacattaattaaacttctattttctgattattttccccaataatttgtaatgtccttagtacaatagttaatccttttaaggtgtcaggattttttaataatgaaaaagtcgcacctaaggtatattttttatcctgataaagagattcttttttagccatattaaaggccgtagttaattcccaaaccggaattaatgtttcttcaaaagcaaccgccaatttttctaccgttgcgttatccataatatcgacggtatctgaggctaaggataataaatcaacaatattatctaggcgctttaatgctaataaaggccttattttttctagtaaatgttctaaatgaattttatcttcattagataacaacggtttttcatttgggcttaaattattttcactcattattttattcccctacaataatcctctgaccgttgcccaatataagccccggttataaccgttacgtaacatgccaccgagttttgttggaggtgttggaataacatcatgtttatagtcatactgtaatggcatacccgctgataatcccatttgggcaacagcttgtactcgaccatcataaattgcagccggataaccataacgcagttcaccacaaatattattagctataacacccgcttggttatgacagctaccaccggccttactaataggcaaatcaaccgtatcacctaacacataaacttgatttaacccatatacctgtaatgtttcagggtcggtcggtagccagccttcaccattgttatattcacttaatcctgtattacgaatggcttctaccgctgttataggaggtgtgctcattaagatatcaaaaggctctgcttctccttctttcgaataggcgattttcttatcaggatcaacatgacttaatgtaaaaccacgctttgctttgatatctcgttcagaaaagaccgcaggaagtacttcacaaacttcttgctgcataaaaagacaatttcttaatagttgagctacggtaggataggtataaacaatttctatattacttcttacccgtcgctgacgtaaaaattcatccagcatcaaggttgtttccattggtgcaataccacattggtgaggtacatttggcgtttcagggaaagttaccgtgataaatacacgccctttttcaatggtagcaattttatctgctaattttcgtgcagcttcatattgataaaaatgatttccagcttcagctaaaccttcaattctatcaagacgaggaacacatcctgtggctaatacgagaaaatcatagtgatattttttcttagaacaacaataaactgttttattattaaaatcgaaactttcagctttatctataacaaattcaatttctggtcttaataaacttctttgtgatcgcattaactcttcttttaagaaaaggttaaatgcaatatacataaatgcaggtttgtaataatggtatggattatctgaaataagcgtaatttttattttttttgaaaatatttcatcatttaattttttagctaagatattagcgagaatagtaccccccgtaccaccgccaataataactatattttttgttgccatattatttcctatatttgtagggaattagatagacaaaaaaagtatagtaaagcgcgttaatataacaaatagattaaatagatagataaattaaatatagagtaataatactaatcaataataaatacaatcatattatattaaaatatttatattttaatattaacgaatgttattatcacgagttaagaaaaggtcgccaccaaaggattatgatcagatgcatctgtgattaagatttccgctttatttagtgataatccacgataaaatatataatcaagtggcttaccaaaagcgcgagtgcgtaaatccttttcaaagatcacttctttaagttttaatcttctagcaaaacgctttaacacattaactcttggacgactccaagcgttaaaatcccccgccaaaataacaggccctttatgatcgatgatatgagtcgataagctgtttaattgtctttgataaacatcaacaccgaaactaaaattgatcgcgtgtacatttatcaccattaaatgctcaccagtaataagtggataaaccgtaattaatgcagatttagcaagccttaaaaaaggctctttttctcttaatgggcaacaatagataggatgagaacttgataaggtcataacacccgcagggtgctgttgaaaggctaaagcaggaacttgatcagcaattaaatggtttttacccgcaaaacgaactaattcaggtgttgtttgcgcttcttgtaaaagtaatagttgagtatcggtggcaagcgtttccagcatactacgccaattgacccgttgctgtttgtaaatattccaaacagcaatttttaaagtgccttctgtatatagtggcatcccaatcggtagcatctcttctatttggcctaaaggtagactaggttcaatcctttctacaggttgacctgctacaaaacgtactgaataagtcggttttttcgccattaagcaacctcagataaccaataggatctcttgctacctatctagtataccaaagctgggatctcccctcacccttttaaagaatataatgataaataagtgtaactatttttgtaaaaaatagctttaatggcgaattattatgaaataagcacaggtaatgtaggcaactttaaattttaaacaaaaaaaaacctaagtcattagacttaggttttcttatgtgttggcggaacggacgggactcgaacccgcgaccccctgcgtgacaggcaggtattctaaccaactgaactaccgctccgcttattctttacgcacttaacgtctttttacattaaggctttaatttaatgcttggcagttccctactctcacatggggagaccccacactaccatcggcgctacggcgtttcacttctgagttcggcatgggatcaggtgggaccaccgcgctatggccaccaagcaaattcggttttaattacccgttatcttctgttatcacagtctataaccagtaattcaatcttgaacaagctgacttcatcattttgtctctctgacaaaacactttcggtgttgtcaggttaagcctcacggttcattagtactggttagctcaacgtatcgctacgcttacacacccagcctatcaacgtcttagtcttaaacgttcctttaggtcacttaaagtgacagggaagactcatctcgaggcaagtttcccgcttagatgctttcagcggttatctcttccgcacttagctaccgggcaatgccattggcatgacaacccgaacaccagtggtgcgttcactccggtcctctcgtactaggagcaacccctctcaatcttccaacgcccacggcagatagggaccgaactgtctcacgacgttctaaacccagctcgcgtaccactttaaatggcgaacagccatacccttgggacctacttcagccccaggatgtgatgagccgacatcgaggtgccaaacaccgccgtcgatatgaactcttgggcggtatcagcctgttatccccggagtaccttttatccgttgagcgatggcccttccattcagaaccaccggatcactaagacctactttcgtacctgctcgagccgtcactctcgcagtcaagctggcttatgcctttgcactaaccgcatgatgtccgaccatgcttagccaaccttcgtgctcctccgttactctttaggaggagaccgccccagtcaaactacccaccagacacggtccccgacccagtttatgggcctaggttagaacatcaaacgttaaagggtggtatttcaaggttggctccatgcagactggcgtccacacttcaaagcctcccacctatcctacacatcaaggctcaatgttcagtgtcaagctatagtaaaggttcacggggtctttccgtcttgccgcgggtacactgcatcttcacagcgagttcaatttcactgagtctcgggtggagacagcctggccatcattacgccattcgtgcaggtcggaacttacccgacaaggaatttcgctaccttaggaccgttatagttacggccgccgtttactggggcttcgatcaggagcttcgccttacggctgaccccatcaattaaccttccagcaccgggcaggcgtcacaccgtatacgtccactttcgtgtttgcacagtgctgtgtttttaataaacagttgcagccagctggtatcttcgactggcttcagcgccgtccgcaagggactttacctaccgccagcgtgccttctcccgaagttacggcaccattttgcctagttccttcacccgagttctctcaagcgcctgagtattctctacctgaccacctgtgtcggtttggggtacgattgttggtaacctgaagcttagaggcttttcctggaagcggggcatcaattgcttcaccaccttggtggttcgtcatcacatctcagcattaagtgaccggatttgcctaatcactctgcctacctgcttgaaccgggacgaccgtcgcccggacaacctagccttctccgttcccccatcgcagttaccaccagtacgggaatattaacccgtttcccatcgactacgcttttcagcctcgccttaggggtcgactcaccctgccccgattaacgttggacaggaacccttggtcttccggcgtgcgggtttttcacccgcattatcgttacttatgtcagcattcgcacttctgatacctccagcatacctcacagtataccttcgcaggcttacagaacgctcccctacccaacaacactttgtgtcgctgccgcagcttcggtgcatggtttagccccgttacatcttccgcgcgggccgactcgaccagtgagctattacgctttctttaaatgatggctgcttctaagccaacatcctggctgtctgagccttcccacttcgtttcccacttaaccatgactttgggaccttagctggcggtctgggttgtttccctcttcacgacggacgttagcacccgccgtgtgtctcccgtgataacattcttcggtattcgcagtttgcatcgagttggtaagtcgggatgaccccctagtcgaaacagtgctctacccccgaagatgaattcacgaggcgctacctaaatagctttcggggagaaccagctatctcccggtttgattggcctttcacccccatccacaagtcatccgctaatttttcaacattagtcggttcggtcctccagttagtgttacccaaccttcaacctgcccatggatagatcaccgggtttcgggtctataccctgcaactcattcgcccagttaagactcggtttccctacggctcccctatacggttaaccttgctacagaatataagtcgctgacccattatacaaaaggtacgcagtcaccccatcctcaaatgtcccgcttgcctttgcgttcaatcttgcccgattttttaacttccgttgctcgtgtacttctaggtacactgcgcgacggcttgaaaaaatcgaccaaccttgttagcaaattcggcgctattttcggtgatgttattgcatcactcagtgcgaggcacttgagtgatggggctcctactgcttgtacgtacacggtttcaggttctttttcactcccctcgccggggttcttttcgcctttccctcacggtactggttcactatcggtcaatcaggagtatttagccttggaggatggtccccccatattcagacaggataacacgtgtcccgccctactcgtcgagttcacaataacagcatcttcagatacggggctatcaccctttactgccggactttccagaccgttctcctgacactgctattgattaagactctgggctgctccccgttcgctcgccgctactaggggaatctcggttgatttcttttcctcggggtactgagatgtttcagttctcccggttcgcctcattaacctatggattcagttaatgatagtatccattggatactgggtttccccattcggatatcgtcgggtataacggttcatatcaccttaccgacgcttttcgcagattagcacgtccttcatcgcctctgattgcctaggcatccaccgtgtacgcttattcgcttaacctcacaacccgaaagtgtctctttcaaagactatctgggtggtgatggctgcgcagattacatttcttcgttgggcagtgctcgcaatgctcacatacttaagtatgctgcgcttgctgtgcgctgtccgcctcgaactgtaaattgctcgctcatcccactttgatgtcaaaacacattcaaagtttgagattttgagagactcaccaatatacctcgttgatatattgatttgttttcaatttttcagcttgttccagattgttaaagagcataataagtaagataactcgtttgaattagcttagttattctctgactctcgtcagataagtggtacgcctttcactcataccgcgcattggcgtcccctaggggattcgaacccctgttaccgccgtgaaagggcggtgtcctaggcctctagacgaaggggacttctgtcagcttcgcagacgcgcttttgctcgttcttcatcagacaatctgtgtgagcactgcacataacacgtatctcttaggtaaggaggtgatccaaccgcaggttcccctacggttaccttgttacgacttcaccccagtcatgaatcacaaagtggtaagcgccctcccgaaggttaagctacctacttcttttgcaacccactcccatggtgtgacgggcggtgtgtacaaggcccgggaacgtattcaccgtagcattctgatctacgattactagcgattccgacttcatggagtcgagttgcagactccaatccggactacgacagactttatgagttccgcttgctctcgcgaggtcgcttctctttgtatctgccattgtagcacgtgtgtagccctactcgtaagggccatgatgacttgacgtcatccccaccttcctccggtttatcaccggcagtctcctttgagttcccaccatcacgtgctggcaacaaaggataagggttgcgctcgttgcgggacttaacccaacatttcacaacacgagctgacgacagccatgcagcacctgtctcagcgttcccgaaggcactcctctatctctaaaggattcgctggatgtcaagagtaggtaaggttcttcgcgttgcatcgaattaaaccacatgctccaccgcttgtgcgggcccccgtcaattcatttgagttttaaccttgcggccgtactccccaggcggtcgatttaacgcgttagctccagaagccacggttcaagaccacaacctctaaatcgacatcgtttacagcgtggactaccagggtatctaatcctgtttgctccccacgctttcgcacctgagcgtcagtctttgtccagggggccgccttcgccaccggtattcctccacatctctacgcatttcaccgctacacatggaattctacccccctctacaagactctagccaaccagtttcagatgcaattcccaagttaagctcggggctttcacatctgacttaattgaccgcctgcgtgcgctttacgcccagtaattccgattaacgcttgcaccctccgtattaccgcggctgctggcacggagttagccggtgcttcttctgcgggtaacgtcaattgacaagggtattaaccttatcaccttcctccccgctgaaagtactttacaaccctaaggccttcttcatacacgcggcatggctgcatcaggcttgcgcccattgtgcaatattccccactgctgcctcccgtaggagtctgggccgtgtctcagtcccagtgtggctgatcatcctctcagaccagctagagatcgtcgcctaggtgagcctttaccccacctactagctaatcccatatgggttcatccgatagtgcaaggtccgaagagcccctgctttggtccgtagacattatgcggtattagccaccgtttccagtagttatccccctctatcgggcagatccccatacattactcacccgtccgccgctcgtcagcaagaaagcaagctttctcctgttaccgctcgacttgcatgtgttaggcctgccgccagcgttcaatctgagccatgatcaaactcttcaattaaaagtgtttgatgctcaaagaaatcgaaaacttagcttattcattatatgaattaacttgttagtcactcttcaagacttgatacatctaattttttagaagatatcgtctctgcgagtgcccacacagattgtctgataatttgttaaagagcagtgcaactatcgctgccgtttccggtcttctgcgttgttgcgaggaggtgcattctacatcttcctcattcagtgtcaagcgctaatttatcaggcttttcactttttattttgttctctcagccggttcgcttagcgccctgtgccgtgacaacgaggacgcattatagggagttttctgaggctggcaatagttttttgaaaaaaaatgtttgtttgttggttaattaaacgaagtgcctattttttgtggcttttaagccattttggcaagtcggctaagctatctagaacaaaatctgcacaagtttcggcctcttctgtaatcgcttttcctgtgcgaacgagaattttatgcccaactccagccgcttttgctgccaacatatcttcttttttatctcccaccatataagaagatgccatatcgatgtttaattgtgctttcgcatccataaacatacctgttgcaggtttacgacagtcacactcttttttgtattcttctataattgcatctggatgatgtgggcaataataaatgccgtctaaatcgacgcctcgatcagctaaagaccaatccatccattcagttaaatgtaaaaactgatcttcactataataccctcgaccaatacctgactgattagtcactagcactaaagcatatcccatggcttttaattcagccattgcttcaatcacaccttcgataaattcaaagttatcaatttcagatacataaccatgatcgatattaatcgttccatcgcgatctaaaaaaatcgcagaaatccccttgctcacagcattactccttttagatatttgcgcttagtatcgcatgttttttcttatatagagaagcatatccacctttctttcttttattgactattattacctattacgcttctgctcttttttgttgacttggacgtctagacgccttaacatctattttaactcgggcagaatagcgtgaatgtcccatattctacttatataaagaacaagatgattaaactgacgaatataaataaagtatttaagcagggagcgcgttcaatacaagcgctatcaaatattaacctgcatgtgccacaagggcagatttttggtgtgattgggtcgtcaggtgcaggtaaaagtactctcatacgctgtgtaaacatgttagaaaagccgacatcaggtgaagtttgggttgatggtcgtgatctaacaaaattatctgataaagaattaaccaaagcacgtcgtggcattggcatgattttccaacattttaatttactgtcctcaagaacggtatttgataatgttgccttacctctagaacttgataacacgccgcgtgcagatattaataaacgtgttaatgagttattagaattagtgggtttagcagataaaaaagagtattaccctgccaatttatcagggggacaaaagcagcgtgttgcgattgctcgagcattagctaattcaccaaacgttttattgtgtgatgaggcaactagtgctcttgatcccgcaacgacgcgttctattttagaactgttaaaagatattaatcgtcgtttaggattaactattttacttatcactcatgagatggatgttgtaaaacgtatttgtgaccaagttgccgtgatcagtggtggtcaattagttgaaagtgatgcggtaagtgaggttttctctcaccctaaaacacccgtttctcaagcatttattcaatcaacattacaattggatattcctgacgattataaagaacgtatgaagccagagtgggaagaaggcttattcccgctgttaaagcttgaatttaatgggttatctgttgatgcgccattaatgtctattgttgctcgtcgttttgatgctgatattaatattttaagttctcaaatggactatgccggtggagtaaagtttggcgtgatgctagcagaattacacggtaaaaatggtaacacagaaaagtctatcgcgtttttagaagagcatcatgtgaaagtagaggttctcggttatgtctgaaggaatgatttatttattaattagtgggatctgggaaaccttagtcatgacatttgtctcaggcttttttggttttgtcattggattaccattaggtgtcttactttatgtgactcgtccagagcaaattatggcgaactcccccgcttataaagtgatttctgctttagttaatatttttagggccatcccttttattatcttattagtttggatgatcccttttacacgtatggtagtaggaacatccattggtttacaggcggctatcgttccgttaactgtaggagctgcaccttttattgcacgtatggtagaaaataccttattagaaatacctcatggtttaattgaagcttctcgtgccatgggggcaacaccaatgcagataatcaagaaagttttattaccagaatctttaccaggtttaattaatgctgcgaccattacactcattacattagtcggttattccgcaatggggggcgctgtgggtgccggtggtttaggtcaaattggttatcagtatggttatgtgggctataatgccacagtaatgaataccgtcattgtactacttgttattcttgtttttatcattcagtttattggcgatcgtttagttaaactgacaacacataaataaatgaattaaaggtttctattcatctactatctaatcaataaatgtagtttgtatgaaaccttttatttaaccagttcaaagaaagggtaaatctatgtcattgaaatttaaatcacttgctgtagtcagtgcgttagtcggtgctttagctttagcaggttgtggcgaaaaagaaaaagatcccaatcatatccgtgtgggggttatttctggttctgaacaacaagttgctgaagttgctaaacaagtcgctaaagataaatatggacttaatgttgaactcgtcactttcaatgactttgtcatgccgaatgaatcattaagccgtggtgatattgatattaatgcctttcaacataagccttatttagatcaacaaatcaaagatcgtaattacaaaattacggctgtaggtaatacctttatttaccctattgctggttattctaaaaaaataacggatttagccgatttacccgatggtgcacaagtggctatccctaatgatccaaccaacttaggtcgttcactgctacttttagaaaaagtaggattagtgaaattaaaggaaggggttggtttattaccgactaaactggatatcattgaaaatccgaaaaacatacaattagttgagttagaagcaccacaattaccgcgctctttagatgatcaaaaaatctacttagcggttattaatacaacctatgcgagtcaagttaacttaactccagcaaaagatggtatttttgttgaagataaagattcaccttatgtcaatattattgttgcccgtgaggacaataaagatgatgaaaatgtgaagaaatttattcaatcttatcaaacagatgaagttgatagcgctgcgaataagatttttaacggtggtgcagtaaaaggttggtaatcatctcacaactcaacttaataataaaaaaggcggacatttgttcgcctttctcttttttactgggctaatttgcattaaattagggcggtttaatttttgtatagacaataataaagaggatatacccatgcacatgcgcttgctacttattggcattatagcgctgtttatgaccggctgttcaatgcagaaatcatctgatgttgatcagtctaagtttacggatatgcgtttaaataaacctggccaaccacaaaagcccaaacagcaaactttatctcctgttcgcattgttgaaaaaacagaagatcttttaggtgcgccttttaaagatttaggtgttgttgccggtgaatcttgccgacaaacactacaagatccacccgcaagcttacctgctgcgaaaaaaagaatggctatcaaagcggcttataaaaatgcgaatgcagttttattacatgaatgccaaatagtcacaggaatgggttgctatcaatcggcaatctgtgaaggttcagcactattaattactcaatgaatagctaccaaataacatctatagggcatattatcagcccttataaagagaaatttgccgttcctcgccaacctggattagtccaggatggcgtaggccagctaatactacacacaccttataatcatcctgatgcagtaagaggcttagaacaatttagccatctttggttattatttatttttcatcaaacagcgcaacaaggttggcatccattagtgcgcccgccaagattaggggggaatagcaaactcggggttttcgccactcgctcaacttttcgccctaatgctatcggcatgtcattagtcgagctaaaagatatcattattgaaaagcaatcggtgattttgcaactaggcagtctagatcttattgatgggacccccattattgatatcaagccgtaccttccctatgctgagtctattgcggatgcaacagcaggctttgcccaatatgctcctcatgaagagatggagattcttttttctgaagatgccacacagcagttacaatattactctcatcaatatcctcatcttatgcgatttatcactcaagtattgcaacaagatccgcgtcctgcttataaaaaaagcgaacaaagtgatagagtatatgccgtgcatttactggattttaatattcgttggcaagtcaatgggcagcaaacacttgttcttagtatagaaccgcgctaacttgcacttactaacattgaaacttcttgtctttaagcaaatcagattgaaaaaaatgctttgcctcttttggcaaacctaagtcactggtagactaaagactttctctatttatattgatgtagactggcctgacagtcagcctaagtatttttgttctaatggaacctaataatgcgtactagccactatttgctctctactttgaaagagacgcctgctgatgccgaaattgtcagccatcaactcatgcttcgcgcaggtatgatccgtaaactcgcatctggtctttatgattggatgccgaccggtgttcgtgtcctgagaaaaattgagaaaattgttcgtgaagagatggacaacgcaggctcacttgaaatttcaatgccggttgttcagcctgctgatctatggcaagaaagtggccgttgggaacaatatggcccagaattgttgcgttttacagatcgtggtgagcgtccttttgttttaggtccaacccatgaagaagtggtgaccgatattgttcgtaatgaaatcacctcttacaaacaactaccactcaacctttaccaaattcaaactaaattccgtgatgaagtacgcccgcgctttggtgttatgcgttcacgtgagtttatcatgaaagatgcctattcattccatatctctcaagagtctctacaagagacttacgacagaatgtatcaagcctatagcaatatctttactcgtattggtttagacttccgtccagtattggctgatacaggctctattggtggtagtgcctctcatgaattccaagtattagcagatagcggagaagatgatatcgtattctcaacagcatctgactatgctgctaatattgaattagcagaagcggttatgccagcaacacctcgttcaccagcaacagaagagttacgtttagtagatacaccaaacgcaaaaactattgctgaattagttgaacaatttaatctgcctattgaaaaaacagttaaaacacttattgttcatgcaactgaagaaagtggtcataaattagtggctttattagtccgtggtgatcatgagctcaatgaaataaaagcagaaaaatgtagcattgtcgcttcacctttagttttcgcgactgaagaagagatccgccaagctgttaatgcaggtccaggctctcttggtccaattaacttgccattaccaatcattatcgatcgcgctgtatctgttatgagcgattttggtgctggtgcaaatattgatggtaaacactactttggtattaactgggagcgtgatttacctcttgctgaaatggcggatatccgtaatgttgtcgaaggtgatccaagcccagatggtaaaggtactttacttatcaaacgtggtattgaagtcggtcatatcttccaactaggtaagaaatattctgaagcattaaaagcaacggtacaaaacgaagaaggccataaccaagttgtgactatgggttgttatggtattggtattactcgtatcgttgcagcggcaatcgaacaaaaccatgatgcccgtggtattatctggcctgatgctatcgcacctttccaagttgccattttaccaatgaacatgcatcgttcttatcgtgtaaaagaagtagcagagaaactctatgctgacttacgtgcacagggtattgatgtattatttgatgatcgcaaagagcgcccaggtgtgatgtttgcagatatggaactgattggtgtaccacacaccatcgtgattggtgatcgtaatctggataacgaacaagttgagtataaagcacgccgtagtgatgataaatctctggtcaatgtgaatgatgttgttgcctttattaaagagcaactggtttaatccatttaatattgtttagcccttatgggctaaactgaccaaacttaacgactgctgttaccacttttgttaacgtaaaaaaaaccgctttatttaaagcggtttttttataatgaattaacttctgctattacgacggctattgcaagagccatgacgatcaaagcgtggtttattatcggtaaccactaatgcacgatcatactgtccatcttccattgaaggacgaatactatagtaacctctgacctctagatagacaggtgttccgccatcaacgcctgtagcaaaatagcctttttctaatactaatccatcagcggcatagacacgtccagattggcaatctttaaaggttccagcgtcagcaaaataggtaaattcacccgctaactgcttaggttgaacctttgctaaggtataattaagacccgaattaattacattaccatcgatatccaacataactaatttatcttcacgaggtaaatagtaactcttctcgccataactattagtcaaggtcagtttatctttacttaatgaccaagtacctgactcaaaaaaacttcgattgtcatcagaagtgccttggtaactttgctccattacataagagccatcttgattgacaagaatagtcgtgtcgataccagaacaatcggcacaaggtagaatactgttatatgtttgatcaacaattttaccatcgagtgacaggccaatattattctggcagcctgacataataaataaccctgcagcaatggctgcaaataaaagttttttccccatcatcaactccctaagttctgggtactttctaatttctcgttttcaatactagtttagcatttttttaagcaaaaagggtgaataaaaccccctttaagataattacactacgttttagtataaattcttaaatcttgtcgcagaatgcactatttcagaaaattatcacaataactattgtgatcacttcgaataacagcataatgattttattctgaattattcactggcggcaataccgccacgaacgagtggtgagggaatatgtcaacaaatacagaatatcaaccaattaattgtgatgattatgaatatttggagttagcttgccaacgaggcttaacactccatattgaattacataatggtgagcaaattgatggtgtcgcagatgatctctttttaagtaaaaaagttgaatatctgaaagtaaaaacatctgagggtgcaaaagatttacgactggatattattgccagtttttctcatcccgaacttggcactatcataatcaaatctgaataactatttacataaacaaccgccgtaattggcggttgtttacgacgcttgccactcaattgttatactttgttctgttgttgcatttccctctaaagtcacaaaagtattaaccgctgcaattaatgtatcgttataataaatcaatgggatacgagttctttgccatggggcaatattaagctcttgccaaattttcttgcttgatctggccaaatctcgcccaacaatacgtaaagatgaagccgttaagccaaaacgaaccgtcactttttcatctgctaacggtgctctgcagattgttttaccgctatcacgactcaccgctaatatccctaactgattaggcaaaattaaaggttgtgataatgaccattcgataaccctatccgttagttcttccataactggcacaagatagaggcgttgttgataacgcctaacttcatcttggaaaaaacgtaaccgtggctctgcatctgctttagctaaagcaacttcttgccatagccgcgacaattgagatcttgatggcatgcttttattacatttagcaaaccaacgacgcaacaatgcattacgttttatttcgctacagcgggacaataaattgatatctaaactctgatgctcatcaatcaattgctgcaattctacatcgagtaactcatctaagagcgcttcttgttcaccacacagtgcggcactacgagtaactgcttgagaaaaatgtggccagcgctgagtcaatagaggcataacatgtaaacgtaagaaattgcgatcatagcgatcatcttgattactatcatcctcaatccataataaaccgtgctcatgtgcataagcttcgatttgttcacgtgtaatattaagtaatggtcgtaataaatacccttgttcaaaaggcatttttgcaggcattgaagacaaccctgccggtccactaccgcgtttaagcgctaataggaaagtttccgcttgatcatcttgatgttgtgccgtcactaaaacttgattaggctgtaaatattggcgataagcttgatagcgcgcttctctggcaccctgctcaatccccccttctttcccattgacttgtactctttcactgataaaactgacctgccagttatgacaaaaatgttcgcaatgcgtgagccaatcatcggcttttgaattcaatccatgatgaacataaattgccgttaattctaaaggaagttgatatttatcacgtaagcaaaccaacccatgcaataaaacggttgaatcaactccaccactaaaacccactaaaatatgagtatgagagccaatttgtcgtttaatttcgttaataagaggacaatttttcagttccatagcattatcagttatcgaggaattcaatgggttatgttaagcctttccattgcattttgcacgaacacaacctttcgccacaacataataaaaaagaaagcagaatatagcttttcacttaagctgataacgatactaagaaaatgctgtcctcatcgctgtcatgggtttaaattatgccgtaaaaccaccatcaacgagataagaagcccctgtgacaaacgaggcagcatcacttgctaaaaaggcaacaacattagccacctcttcaggtgtacctaaccgaccaatagggtgtaaagcgacgagtttttgtttgtctaattcacgcccctctaataaaggagtatcaatatagcctggacaaacagcattaacacgaataccttgactggcataatcaagcgctaacgtttgtgtgagtaatttaatgccccctttagaggagcaataagcaggaaatgcatgctggccgacaaaagagcagattgaactacagttaacaatagcgcctgtggttttagtttctaaccaatgttgaataaccgcgcggttaataagaaatagtccattaagattaacatcaagcacttttttccattgatcgtaatgtaatttatcggcaacggtatcggttaaaacacccgcattagcaaataaaaaatccactttgccataatgttttactacatgcttaaccagttgttgattatcttgctcattggcggcatccatttgaacaaattctgcggaaaaccctttatcttgcaaatagttttgtgctttttccccacgacctgaatgacttccagtaataacaaccgatgcccctagtgataaaaatttctcagcgctagctaaaccgataccactattacctccggtgataatgcctactttgttgctaaatgaaatcataacttttccttctttgattaacgataagccttatcaaatcataggtagggttacgtattttttaagcaaagataaacataaatcttatatttgagatcgagttaacatattgatatataattaaaaatgaaagtatcacaagctattactattaacaatagaaatagttttataaaagaaaaattagctggagtgatagtggtgtgataatagcctgatcctattcgccataaaaaaaaccccatgctatagcatggggagtgatctttttaatggctagctaagtacccgctcaatcagcaatagccatattccattaagcgttgataacggcggttagtgagttcttctgtatcaaactcatctaactgcgctaaatcagcttttagctgtgcttttagtgatgctgccatttcatcataatgacgatgagcaccacctaaaggttcagggatcaccgtatcaatcaattttaattcttttaaacgatttgccgtgatccccatagcttcagcagctaatggtgctttatcagcactcttccatagaatagaagcacaaccttctggcgaaataacggaataggtgctgtactgcaacatattcactttatcacccacaccaatcgccaaagcaccaccagagccaccttcgccaataacggtacaaataattggcacaccaaagcgagacatttctcttaaattacgagcaatcgcttctgattgtccacgctcttcagcgcccacccccgggtaagctcccggagtatcaataaaagtgataataggtaatttaaaacgttgtgccatttccattaaacgtagcgctttgcgataaccttcaggagctggcataccaaaattacgacgaattttttctttcgtttcacgtcctttttgatgaccaatgatcatcaccggacgaccgtctaaacgagcaataccaccgacaatcgctttatcatcagcataagcgcgatcgcccgccaactcctgaaaatcagtaaaaacacgattaatataatcaagggtataaggtcttaatggatgacgagcaagttgtgccacttgccatgcaccaagatcagagaaaatttttcgagtaagttctaaacttttttctcttaagcgtgcaacttcttcatcaatattaatatcaattttttcatcatgttggctaactgcggttagcgaatcgattttcgcttctaactcggcaattggctgttcaaaatccagaaaattaagactcataacattcctattctagtcaaattctaattccacctgctcattacccagcagagttcgcagatcggtcaaaagcatatcagtcggcgttactcgccatgttgcaccaaaacgcaaacgtgcacaggcatcatgcttttgaaaataaagatgaaccgggatcgtgcctgaacgatgaggttctaaaacgccgcgaagacgatttaataattgctcattaatttgcctgtctgataacgagatagcaagccctcgagcatatttttcacgcgcttcgttaatatccattaattcgcggactgtcattttaagcccaccgttgaaatcatcaaagctgacctgcccggtagcaattaaaatccgatcttgttccaatagatgttggtatttatctaatgcatcggaaaataacataatttccaaacgaccagaacgatcatctaacgtacatataccaattctattccctcgtttagtggtaaagactttcgaagcaaggactaatcctgccacttttaccatctgacctcggggggtaggtactaaatcttttagacgggttcctgccgcatatcgttcaatttcttttagataacgggtgatgggatgtcccgttaaatataaaccgagggtttctcgctcaccttctaaaacaacttgatctggccatttaggtacattggcataagaacgttccacttgctctggggcttctgccaatacaccaaacatatcggattgcccaatggcttccgcttttgcgtgttgatctgccgcctttaaggcatcttccagcgaagacattaatgctgcacggtgaggccctaatttatcaaatgcgcctgacattatcagtttttccatcactcggcgattcaattttttggtttctgttctcgcacagagatcaaaaatatctttaaaatgaccaccttgttgacgcgcttcgacaattgcctcaatagggccttctccaacccctttgatggcccctatgccatacactatttcgccttcatcattaacatggaaatgataaagcccactattaatatctggaggaaggacttttaaacccattcgccaacattcatccaccagaccgaccactttttcggtattatccatatctgcagtcatgactgccgccataaactccgcaggatagtgagcttttaaccagagcgtttgataagaaactaaggcataagccgctgagtgcgatttgttaaatccataaccggcaaatttctctaccaagtcaaagattttcatggctaattcgccatcaacaccgtttttaatcgcccccgcttcaaacacagagcgctgttttgccatctcctcaggttttttcttacccatcgcgcgtcgtaacatatccgcgccacccaaggtataaccggcaagtacctgtgcaatctgcatcacttgctcttgatacaagataacaccataagttggctctaatacaggctgtaagctctcatgttgccatttaacatcagggtaggaaatctcttcaacaccgtgttttcggtcgataaagttatccaccatccccgactgtaaaggccctgggcgaaacagtgcaactaacgcaatcatatcttcgaagcagtctggtcgcagacgctttatcagatctttcatgccacgggattccaattggaataccgcggtggtttcagagcgttgcaacatatcgaagctacgctgatcggttaatgaaatggctgatatatcaacaggctcaagtgattttttagcccgccgagcattaatcatttctaatgcccagttgattatcgtcagtgttcttaaccctaagaagtcaaatttaacaagaccggcatattcaacatcattcttatcaaattgtgtaaccgggttattcccttccggatcgcaataaagtggcgcaaagtcggtaattttggttggagaaataacgacaccaccggcatgcttacccgcattacgggttaccccttctaatttacgcgccatatcaataagcgatttcacttcttcatcagcttcgtaaatttcaggtaactgaggctcggcggcaaaggctttttctaacgtcattcccggatcagggggaacaagcttggaaattctatcaacgaagccataagggtgtcctaaaacacgcccaacatctcgaataacagctttggccgccatagtaccaaaggtaatgatttgcgatacggcatcacgaccatacatatccgcaacgtgatcgataactctatcgcgcttctccatacagaaatcaacgtcaaagtcaggcattgatacacgttctggattaagaaaacgttcaaacagtagatcaaactcaagaggatcgagatctgttatcttaagcgaataagccaccagtgagccagcacctgaaccacgtcctggccctacaggaacaccgttatctttagaccactggataaattccatcactatcaaaaagtaaccggggaatcccatctggttaataactttaagttcaatctcaaggcgctcatcgtattcaggacgtcgcttttctctctcttgcggatcaggaaataaaaaggcaaggcgctcttctaagccctctttggactttttaattaagaaatcttctgtactcatatccccggtcgggaattgaggaagaaagtattcacctaaacgaatggtcacattacagcgtttggctatttcaacactgttttctaatgcttcaggaatatcagcaaaaagctcacacatctcttcttctgtgcgcatatattgctgaggactgtagtgtttaggacgtttaggatcggataatgtgaaaccatcatgaatagccacgcgaatttcatgagcatcaaaatcatcactatccagaaaacggacatcatttgtcgcaacaacaggaagccctttttctgatgctaaggctacagcttcgtgtaagtagctctcttcatccggacgcccagtacgaataagctctaaataatagctatcaggaaagtgcgtttgataatattcaagacattgctcaactaaagctcgattaccgcgtagtaggaatttaccaacatctcccattctaccgccagaaagcaacaagagaccttctttatatgttgttaaccactcttgtttgataaccggtccggcagcaccataaccatgtttataagcttcagaaatcaatagtgttaggttttgatatcccacattatcacgggcgagaatggttaaatgcgcgtattcatcacctaatagttccgtttccagatagacatctgcaccaacaataggtttgataccggcaccatgagccgctccataaaatttcactaacccacataagttagtgaaatctgtaattgcaaaagcaggcatacccagcgaagccactttcttcacaagaggccctgtttttgccaatccatcgatcattgaataatcgctgtgtacccttagatggataaaacgaggatctgccatatcttattaattactctgtggattagactaaatttaaagcacgttttacaggcgcaaaacttttacgatgataaggcgttgcccctaatgaagccagtttttccatatggaaggctgttggatagcctttatgtttggcaaagccgtaatcaggataaagtttatctagctgttccatttccctatcacgggtaactttagccagtattgacgctgcgctaatttcttgaactaaactatcacctttaatcaccgcttgagatgccattggcaagttaggacaacggtttccgtcgactaagaccatatcaggcgttatggataatcccgcgacagcacgctccatggctttcatcgttgcccaaagaatattcagtttatctatctcttcaggctcagcacgtccaatagcccaacataatgctttttcttttatttcatcataaagcgcattgcgttttttctcggtcaattttttcgagtccattaatccttgaataggattagctggatcgaggatcaccgcagcagtaactaccgcccccaccaatggtccgcgaccgacttcatcgacgccagcaattaggtttgctttaggatagacaaattccattattgacctgctaattctaaaactgcattcgctgcttgctcatcagcacgacaacggatagctgagtgtaattgtaaaaatatctcttttaagtgttgtgctttttccgcatccgttaatagggggagtaattgttctgccagtgcttctggtgtgcactcttcttgcagcaactctttaattatttcccgtcctgctaataaattgggtaaagagacatagggcgttttaactaatttttttgctaaccaaaaggtaaatggtttcatacgataacccactaccatcgggcatttcgttaacatgcattctaaggcggctgtaccagatgctaataaagtcgcatcactggcggtcatcgcctctcttgcttgtccatctaagagttggatttcaagttttggggcaacactttgatgtatttgttcaaattgtgcccgtcgcttcgcatttaccaaagggacaacaatatgtaatgcggggatctgttgctttaatcgctgcgctgtttttataaagtccgcactgagcatttccacttcagaatgccgacttcctggtagcagagctaaacagattgcctcttgatcaatacctaggtgttcacgagccgcttttttatcagggtgtaacgcaattgcatcagccattgtatgaccgataaagcgacaaggaacctgatatttatcgtaaaacgctttttcaaaaggaaggaaagctaaaaccaaatccgttgctttaccaattttaaaaacccgtttttgacgccaagcccatactgatggactgacataatggatagttttcaaccctttttgttttaagcgaccttcaagggtgatattaaaatcaggagcatcaataccaacaaaaacatctggcttaagttgtgtaaagcgttgagtgagatcttttctgatcttcaataatcgtggcaaacgttcaagtacttccacgacccccatcaccgcaagctcttccatttcataccaagcttcacaaccttctgcttgcatcaaaggacctgcgacaccaacaaaacgaatattgggatgcatttgtttaagagcgcggattaatcccgcgcccaagatatcaccggacgtttcaccagccacaaggccgataactaacggacgctgttttatagatgattggcctgacaaggtcatatcctaattagcgaataataccgcggtttgattttgctgagttttccagaaaatcactgaatatttttacatactgattattattgtctgcggctaattgagcaatctcttctcgcgcttcttcaagcgttttaccattacgataaagtatcttgtaagcgttacgaatggcatgcagatcttcttttgcaaaaccgcgacgttttaatccttcaatattcaaaccataaggggtggcatggtttccttgtgcaatcacaaaaggaggaacatcttgtgctacaccggaacagccgcccaccatgacatgtgaaccaatctgacaaaattggtgaaccgcactcataccaccgattatcacataatcacctaaagtgacatgtccacctaaagtaccgttatttgcaataatacagcgatcgccaatgatacaatcatgagcaacatgggtgttgatcatcaataagttatcattgccaattttagtaatattaccgccttgtgtcgtaccacgatgaatagtgacactttcgcggataagattgcgatcaccaataatgacttgggtcggctcaccacgatatttcagatcttggtttacttcaccgatagaggcaaattggtaaatctgattatcacggccaatgcgtgtatggccattaataaccacatgagatttgatatctgtaccttcaccaatctcaacatggctaccaataacgcaaaaagggccaatgcgaacattagcaccaattaccgcaccctcttcaataattgaagaagggtgaattactgcggatttatcaatcataagctagacctcacggcggcgagcacacatcatctcagcttcgcaggcaatttctccatcaactttagcgacgcctttaaagcgcgcaacgccacggcgttctttaatgaattcaacctcaagaaccatttggtctccaggtaagacaggacgtttaaagcgagcaccgtcaatagcagcaaaatagtaaagttcaccgggttccagttttcctacgcttttgaatgctaaaatacctgttgcctgcgccattgcttcgaggatcagtacaccagggaaaataggtttgcccgggaagtgaccttgaaagaaaggctcattaaaagatacattttttactgctcttagaaatttcccttcttcaaaatcaaggacacggtcaaccaataaaaatgggtaacggtgtggaagtaaatctaaaatttcttcgatttgcagagtatgattatcactcattgcaatactcttcctgtctaataaaactgaatctaattaagaatgacacgacctgctgtgactcaaaaagggagttaacgcgcaggtcgcaaaataggtaacaacaaccgtcaaagatgctacttgttacttgtcgctattttctacttgacgttctagcgactttagccttttttgcatttcatcaattcgcagcaccagtgctgcggttttacgccatgctttattcggttgtaacggaatgccagaagaataaaccccaggttcagtgataggacgcataaccatccccattcctgttaccgtaactttatcacaaatttccatgtgaccattgataacacttgctccaccaatcatacagtaacgcccaatcttcaggctccccgccatgatgacaccacctgccacagcagtattgtcaccaataatgacgttatgtgcgatttggcactggttatcaatgataacaccattaccgataactgtgttatctaatgcgcctctatcgatggtagtacatgcaccaatttcgacacggtcaccaatgatcactgagcctaactgaggaattttaatccaattgccacgctcattggcataaccaaaaccatcagaaccaatgacagtaccagattgtactaaacaatctttaccaatgataacttcatgataaacagagacatttgcccacaaacggctattatcgccgatatgtgcttttttaccaataaaacatcctgcaccaataactacgttattacctaactcaacacctgactcaatgaccgcattggcaccaattgagacgttattccctaatttagcatcaacggcaataacagcagaaggatgtatatcttgtgctggcgcgggcgtagtatccataatctgagccatttgtgcataagccagataaggatttttcaccaccagtgcagcaacaggacaaaaaggaagatcagcctctgttaataccaccgcagcggcctgacattcacttaatttttcacgatagcgactatcggaaagaaaggtaatttgttcaccatttgctaagcccattgaagcaagaccggcgatagtgatatcaccatcgccgtgtaactgtgcattcaattgctgagcaagatcagctaatcgaattgaaaacatctattatttaacctgtttttgaacctgagcagtaatatctttaccgtctgcgaaataaggaacagtgtttgcatctaaaatcacatcataaccttcttttttcgctacagcatcaacagcgtctaatacacgtttcatgattttattacgctcttctgcttgacgacggctaaagtcttgctcaaaagcttgtgctttttgtgcataagcttcacgtttagcaaccagatctttttctgtattagcacgttgtgtcgcattcatggttggtgcatctttttggtatttctcaaccgcagtttgtaatgctttacctaaattttgcaattcggtatcacgtgatttaaattcattttccaattgtttctctaccgcatcacggttaggcactttttggagaacttgaccgatgttcacaacacctactttatctgcagcttgagcgcctgctgacatcgtcaatgccattcctagggcagcggcacataacaattttttcacgatagactccttaaaacccaaaataaattttttgtcagatatgagatgtcttttctcaatatatagaaaaggcatcaactttacttacatcgctaccacgttctaccaatattaaactggaattgctcagatttatcgccttcgtaatctttaattggcttcgcataagagaagactaacggacctaaaggtgataaccactgtaaagccacaccggttgaaacacgtatattacttgccttaccaaaatcaggcataccagcagtccaattagaattagtactgttccagttggtatcccataccgtacccgcatcaacaaacattgaagttctgacggatgaggagtatttatcatcaataaatggcgttggtgtgatcagttcaaagctagccaccgccatagcattaccaccgaccgcatcgctagataatgaaggatcaattatcgtactcccatcatcttttgtaatttttttcaaataaatcgctttaggaccgatattattggaacggaaaccacgtactgtaccagaaccaccggcatagaagttttcatagaagggtaattctttaccccctaaaccgtcaccgtaacctaaacgacctttgaacaaggtgacccaagactctttttcatcaagagggtaataagccataccgtcccaagttactttatagtacttgttatcagagcccggtatagtaatacgtccacttaaattacttcttgccccagaggttgggaagaaaccacggtttaagttattaaatgtccacccaagactgacagtatagtcatccgcattaaaggattcgcgtttatcaaagcctgggttttcccccatactttcaagataacgccacatcgccacttgaggttccatccgtgacaggccgttatgggtatagcctaagccaagacgagccgagttgtattcattgatagggaaacctaaggtgccgtctaacccataagatttattggtatagccggataaatctgcatcattagctcggaaatcgttatagaaaatacgacctcctaagctgacaccatttacagtaaagtaaggatcagtgactgacaattcagcatacgttgagtaatcatttttactggcattaatcgcaacggcattccccgttcctaaccagttatcctgtgttaccccaacttggaagctgacaccactttctgtaccgaaaccgacaccaaagttaagtgaacccgtattacgctctttgacacgataaacgatatcaacttgatcaggagatccgggaatacgctgtgtttccgtttcgactgtttcaaaataacctaaacggtttaaacgctctttaccttgttcaactaaatcgctacctaaccaagccccttccatttgacgcatttcacgacgtaaaacagagtccttggttatatcattacccgcaaaacggatttgacgcacatagaaacgattccctgcatcaacgttaacatgcagttttaccgttttattttcatcattaatttcaggatttgtcatcacccgtggataggcgtatccatagcgacctaatagatttttaatctcattttctgttttggtcacttgagcaccgttatatagtgagcctggtgcgatttggatcagatcttcaatctctttggtatagcctgcggtattaccattgatttcggtactttcaaccgtgtatttatcaccttctttcaggttaatagtaatataaataccttttttatcaggcgttaagctaacgtttgtggattcaatatcaaaacgtgcataaccacgatctagataaaaacttcgtaatgtctctaagtcaccagcgagtttttgtttctgatatttttcatcagccgctaagttccaccaaggcacatcatcacgtagttggaagcggttaactaattcagcagtactaaatgctttattaccaacaatattgatttgttgaatagtagctgaaacaccttcggcaaataccagttttaaatcaacacggttacgaggaagaggagtcacaacaacttttactgtggcgttatatttaccaacactatagtagaaatcttcaagacctttctcaatattagccaacattgttcggtcaagtgtttcaccaatacggatattggaagcatcaagattttgcttaagcatatcttctttaattgctttgttacctgagaaagtaatactcgcaattgttggacgctctttaacttgaacaataagtacatttccgtcacgcagaacccgaacatcatcgaagtttcctgtcgcaaataatgaacggatagttcgactaatatcatcatcactgaccgaatctccaactcggacaggcatgttcagtaatgctgcaccaacggcgacgcgttgaagaccttcaaattgaatgtcctgaactacgaatccgtctgaaccgtatgcagtggcgctgcccagcagcagcgacgctataagcaactttttcatcgccatcgttgttttgtgttttcctaaccggtccctgcttattttattataagcgagagaaatcattgaaaagtgcaagtcccattaacagcatcagtgccataacaccgaaacgataacagacatcttgtacacgctcagataccggccctccctttatcttctcgataaccaggaaaagcaggtgcccaccatctaagacaggcaggggaaacaaattaatgatccccagattgacactgataagtgcgataaacatcaaataataaacaaaacctgaatccgcagacattccagcgcctttagcgatagaaaccggtccactaagatttgttaacttgacatcaccaaccactaacttgccaatcattttgacagtcaaacccattaactgccatgttttatcagatgcttcatataacgctgaaaatgggttgtattgttgcattatcaagtattgctcatctggcggtaatacttgtagcttcgcacccacttgtccaacttcgctaccatctttcagcgctattgctgtaggagtaatatttaacaccaaagaagcaccgttacgttcaactaacacttccaacgttttgttggggctttgtcgaacaaaataagtaaatgggtgccaagtatcaattggctgaccatcgactttaacgatccgatcccctgcttgtaaacctgctttttcagccgcagagtctggtgttacttctacaactttagagtccaaccgtgcgccaacaggcatgatgcctagggatacgataggatcttgtctttcaggatcaaaattccactgttgcaaattcagtatattctcactctcagaaagagagttaggctgagttacaacgaaagtcacctcttttgcaccaattttactcactaatgctaaacgaacagcattctgatcaggcgtttcgatacctgcaacggattttagttccattcccggcgttaattttgcttgttctgcgatagaatcagggcgaatatctgcaattattggctttaatgccggcacccctatcataaaaacaagccaataagccacaatggctaataagaaatttgcaataggtccggcggcaacaatagcggctctttgcccgacggttttattgttaaaagcgagatgacgacgctctggtgcaacttcggcgacacgctcatccaacatttttacatagccacctaaaggtatccatgcaacgacaaattcggtgccatgtttatctgttttacgccaaatcgctttaccaaaaccaatagaaaaacgctcaacataaacgccacagcgtcttgctacccaaaaatgtccaaattcatgtaccgtaataagaatacctaaaacgataataaacgcggctagattccacaggatacccattgcttacctttacatttgaaagccagaagaaactaaaaacaccaatccagcgaaaacagggatcgccgcggtcaaactatcaatacgatctagcacaccaccatgcccagggataagctgactactgtcttttatgccagaaacacgtttaaacatactctcagccagatcgccgaatacggaaacaatcaccacgatgcccgaaatcagtaatagatggttaggcacttcagtaattggtgcgaaacgcgtaaatagccatgaaacaacaccagcagtgattaacccgcccaccagaccttccaaggttttacccggtgatactttcggtgccattttatgtttacccattaaacggccaaatgcataagcccctgagtccgcagcccaaaccaataacatgacatacagtaaccaccaggcccctgtatatgagtttgtgctatatcccaacatacgtagcgtcatcatgccacaataaaaaggaacaatcgtcaatataccgaacaataacttaagaagaacagaatttttccacatattggctgaattcggataactgacaactaataaaatcgccgctacccaccaaaagagcccagcccataagctattcttaatcattgctgtatcaagcaggtgatcaaaatccggtaacgaggcttgcataagaactaagagtgcagcaaatccaacacctgtagcaatacgtttaccttgagaatgccagccgataaattgagcccattcccaacccgctaagcctgaaatggcaataataactaatccaaatcctgcgggaggaagaagaaataaagcagcaataacaatagggattagtattaatgcagtaatgacacgatacttaagcaaattatcctcccagatttacagtatctgtttccgatgttgtaccaccgaaacgtctttcccgtttagcaaaagcatcaagtgcattctgaaaaacttgttcatcaaaatcaggccataaaacctgtgtaaaatataactcagcataagcaatttgccagataaggaaattacttatacgatgttctccacctgtacggatcacaagatctacaggcgattgatcgtgtaaacacaagtgtgaggatatcgtattttcattaatatcttcgacagctaactccccttttgcgagggaactcgctaattgttgtacactttgtgtaatatcccatcgcccaccgtaattggcagcaatatttaaattgagtccggtattatttgcagtcagtgcaacagagttttttattctatcttgtaaacggcggctaaaacggctgatatcaccgataattgttaatctgacattgtgtttgtgtaggcttttcacttcattatctaatgcaaaaacaaacaactccatcaaagaactcacctcttgttcagggcgattccagttttcgctgctaaatgcatataacgttagtgattcaattttatgtttgacggaaaagctaaccgcatctcgaactgctttaattcccgcgcgatggcccgtaactcggagtttcccttgtttttttgcccaacgtccgttgccatccataatgatggcaacatgctttggttttgatgcggatgaatcgtcactggataagttcactcaatttaaccctttgctaatctgatactgatacagacagtcctcttcggataacctacgcacaaaaaaaccgtgtgactccacggcctttggcaaagcctcaaagttgctaaagcggttgctttagtaatgaactgttaattttcattattgtctttagtgatttggcaactataccattagccagaaagacgaacaaacacactctggtaaatatcatcatcattatacaatttgtgcgataatctgctgtgtttgtaaccttgctaatttatcaatttctaaaacatcgtcgatactttgaggctcagagaggtcaaaatgttcaaccactttgcgattaattttagcaatatcagtgaattttactttttcgtttaaaaaagcatcaacaacaacctcattagcggcatttaataccgttgttgaagcttgtccccgttgcgaggcttcgatggcaagtgctaaacaaggatagcgctgatagtctggacggataaattctagggcttgtatctcaaaaaaatctaatgctttcgcgcccgattgggtgcgatgaggatatgccatggaataagcgataggcgttctcatatctggctcaccaatttgtgcgataatgctaccatcacgatagcgaaccattgaatggatcaccgattggggatgaataatgacttccatctctgcttccgaggcattaaagaaataacgagcttcgatatattccaagcctttattcatcatagtggctgaatcaaccgaaattttacgccccattgaccagtttggatgtgcgcaagcttggtctggagtcattgcatctagctcatctaaaggcgtatagcgaaacggtccaccggagcctgtgagtaaaatactggtgatgccatgggcttctaaagatgcatggcctaaattgtcttgaatacctgtaggtaaactttggtagatagcattatgttcactatcaataggtaaaaccttcgcaccatatttagccaccgcatcaaagaataaacgaccactcgtgatcagggattctttattggctaataaaattcttttccctttttctatcgcagccagtgtaggcttaagccccgccacccctgtaatagcagacatcacttgatcggcttcatccaatgcagcaatttcattaacagcatcagagcctgataatatttccgttttacacgatgtattggctaataattgtttcagctcaccggcacttttttcatctgacatcaccgcatatttaggctgaaaagcgcgacattgctgcgccattttagttgcattttttccagccactaaagcaagcacctgaaactcatcagggttattttcaatgacggataacgtacttgttccgatagaccctgttgagcctaatatagttatttgtttcattattaatcaatcagtatatcaataacattttcattaaaaggaattatatcagcatgacgagataaatgaggggaaagatgataactttaataaataatgtgataaaaagaagatattaggcatttattttccagtaaatgctcaaaaataatgccacatttcagtggcattatcagaaaaagaataaaaattagaattccattaactcagcttctttcagcgttaatgcttcatcaatttttttaatgaacatatcagttaatttctgaatttcatcttgtgaacggcgttcatcatcttcactaatttctttatctttcagtaatgctttgattttatcattagcatcacgacggatattacgaatagagacacgaccttgttctgcatctccacgcacaactttgattaagtctttacgacgttcttcagttaacggaggcagtggaacacggatgatcgcgcctgctgatgaaggatttaagcctaaatctgatgccataatcgctttttcaacagcaggtgctaaagtacgatcgaacaccgtaattgccaatgtgcgaccatcttctgccacaacgttagcaacttgatttaatggagttggtgcgccgtagtattctacaacaataccatctaataggtttggagacgcacggccagtacgaactttattaatttggctttttagtgcttcaacgcttttgtccatgcgttcttgagcatcttttttgatttcattaatcacgttataaacccttgggaactggttatcttccagacgatatcaaattatgatatcgacataaatgaattggcgtactttaagatgttaacgccaaattataccattgtctctgtgtattaagcgtgagaaatcaaagttccttcactttcacccattacaacccgacgtaatgcacccggtttattcatattgaatacgcggataggtaaattatgatctcgggctaatgtgaatgcagcaagatccatgactttcaattcacgttctaatacatcctgataagtcagcttttcatataataccgcatcaggatctttggttggatcggctgaaaatacaccgtcaacttttgtcgctttcaatacaacgtcagcttcaatttcaataccacgtaaacacgcagctgagtcagtcgtaaagaatgggttgcctgtacctgccgagaagataacaactcggccatggcgtaataagctaatagcctcagcccaactgtagttatcacaaacaccattaagtggaaatgctgacattaatcgtgcattgacataagcacgatgcaatgcatcacgcattgctaagccattcatcactgtggcgagcattcccatgtggtcacccacaacacggttcatacctgcagctgctagaccagcgccacggaacaagttaccaccgccaattacgacaccgacttgtatgcccaattcaacgagttctttaatttcctgagccatgcgatcaagtacgctcgcatcgataccaaaaccttctgcgccttgcagggcttcgccactcagctttaataagattcgctgatatacgggttttgcattggttgccatggtgttctgtcctaagcagattagttaattggaggttttagatagccttactcttttcaaagaaaagcaaactgtcagtggagattgtaacaaaacagaaccgccttaaggcggttctattaacgcaaagcgttattatttgctcattgccgcaacttctgctgcgaaatcagcttcaactttctcaataccttcaccaacttcgaaacgaacgaagttaatgatttcagcattgttttctttcagcagatcgccaacagttttgcttggatccataacgaaatgctgaccagtcagagagatctcaccggtgaatttgttcatacgaccagtaaccattttttctgcgatttcgcgtggtttacctgattgcattgcgatgtccatctggatttggtgctcatgctcaacaacatcagcaggcacatcttcagggcgaacatattctggtttgcttgcagcaacgtgcatagcaatgtgtttgatcagttcttcgttagcgcctttagctgcaactaaaacaccgatgcgagcaccgtgcaggtaagtacctaactcttcaccttctaagatagcaacgcggcgaatgttgatgttttcaccaatttttgcaactaatgcagtacgagcgtcttcgaatttcgctttcagtgcttcgatatcgtcagttttgtctgctaatactgcagccataacatctttaccaaatgcgatgaagccagcatctttagcaacgaagtctgtttcacagttcagttcaaccagcgcaccgaatttaccatcagcagcaacttctgcaaggatgataccttcagcagcaacgcgacctgcttttttagccgcttttgcttgacctgatttacgcatgttgtcgatagctaattcgatatcaccgttagcttcaaccagcgcttttttacattccatcatgcctgcgccagtacgttcacgcagttcttttaccaatgcagcggtaattccagacatttgtttcttcctcgacttttctatgggcgagccatagatgttctcatagcagatgtgtaaagggggcctattgaggccccctaaccaatatatagcaatacctggttaaataagggctcttacgagcatgccttattattcagcttcgactaagccttcttcagcctgaacagccagatcttgagaacgaccttcacgaacagctgttgctgcagcggtcagatataatttaaccgcacggattgcatcatcattaccagggataatgtagtcgataccatctggatcagagttagtatcaacgatagcaaatactgggatacccaggttgtttgcttctttgatagcaatgtgttcgtgctcagcatcgataacaaacagagcgtcaggtaaaccgcccatgtctttgataccacccaggctgttttctaacttaccaagttcacgagaacgcattaacgcttctttcttggtcagtttgtcaaaagtaccgtcctgagattgagattctaaatctttcagacgtttgattgactgacgaacagttttccagttagtcagcataccgcctaaccagcggtggtttacataaaactggtcacagctttctgctgcttctttaacagcttcaacggcagagcgcttagtaccaacaaacaggattttgcctttacgagaagcaattttgttcagttcaaccagagcttcattgaacattggaacagttttttccaagttaatgatatgaactttgttacgcgcaccaaagatgaatggtttcatttttggattccagtaacgagtttggtgaccgaagtgaacaccggcttgcagcatatcgcgcattgaaacagttgccattttagacctctataagtttaaatttggggttatttcctccacaaatcccatacgaccgactcatcagctgtaaagattaaacctttacataagagcaccccggcgtatgtgtcgatttgtgtgtgtcattaacacaattgaatgttttcagatttactgctatttcttaaacctcacgcggtgaagtcatagccaataacagaactccggcgcgctttataccataaataacctcaagaaaccactattagttacggtttcactgccaatatatcggttaacaacagcaaataaaaaagcgcaatatgtaaagacaacaaacaatataaggcgtaatgtgcctgattattggcgatatcaaacagattactcctatcctctttgattggcacacccactttctgctgatatcataaatggtaattagaattatttctcaccatcataattcatagacctgcaataccatgcaataatgattgtattgtggcttttaaatctattaatgaagaactcaaatggctattgtaatcaagactgaagaagatattcaaaaaatgcgcgtcgcgggtcgtcttgcggctgaagtccttgaagttgtcgcaccctatgtaaaacccggcgtaagtacagcggaattagatcgtatttgtcatcaacatattgttgatgttcagcaagctatccctgcttgcttaaactatcatggcttccctaaatcagtgtgtatttctgttaatgatgttatttgccatggtattcctagtgaagacaaaatcttaaaagacggcgatattgttaatattgatgttactgtcattaaagagggttttcatggcgatacgtcaaaaatgtttatcgtcggtaaaccgactattcaaggtgagcgtctgtgtcggatcacccaagaaagtctctaccttgcaataaaaatggtaaaaccaggtattcgcttacgtgaattaggtaaggccattcaaaaattcgttgaagggcatgatttttctgtggtacgcgaatattgtggacatggtattggcgaaggtttccacgaagagcctcaagttttacactatgatgctgatgacggtggtgttgtgttacaaaaaggcatggcatttactatcgagccgatggtcaatactggagattaccgtattcgtaccatgaaagatggttggacagtaaaaaccaaagatcgcggttggtctgctcaatatgagcatactttagtggttaccgacaatggttgtgaaatcatgacactgcgtaaagaagaagagccatttatttctgccgtattagtcaacgaataaatcgcactcttctaaaatgtaaaaacgacatattttttcgaggtatgtcgttttttttattttcaactttggtaagaaaatagaaatgctagtcaggttaccgttttaacattactcttaatataatcagcatatatgagtgagatgattaactatgataacctccaatacctttcaaacagcaccaccgtccccttcgttgctgactgaaaatacgctagatagtactttactaaaacactctattgaacaatttcagtcatggttagcagatgcttttcatcatgatgctgatgttgctttgttactacaagctcgtagtcactttatcgaccaactactcacacaattatggcgttatactgaattagcggatcaccctgatctctgtatcattgccgtgggggggtatggtcgccaagaattacaccctctttctgacattgacttgctatttttaagtcaacagcctcttcctccccaacttgccgaaaaagtgagtcaattaattaccttgctttgggatatccgcttagagataggtgtcagtgtgagaacgatggaagagtgccttttagaaggactgtctgatttaactattgccaccaatttactagaagcgcgtcttgtttgtggtaataacgcactctatcaacaattaattaaacatatttttagccaaggcttttggccatcgcctgatttctttgcagctaaaattgatgagcaagaacaacgtcaccaacgctttcatagcaccagttataatctagagcctgatattaaaagtagtcctgggggacttcgtgatattcacacccttatatgggtcgctcaccgtcattttggcgcaacatcaatatctgaaatggtcaactttggctttttaacccctgccgaaggacaagaattactcgagtgccaatataccttatggaagatccgttttgcgctacatttagtcctcaatcgttatgacaataggttactgtttgatcgccaattaagcgttgcccaacttttaaattatcaaggtgaaggcaaccaacctgtcgaaaaaatgatgaaggattactatcgcgttactcgccgtgtgagtgagctaaacgatatgctactgcaactctttgatgaagcaatcctcgcattacaacccaatgttaaacctcgccctcttgacaaagaatttcaattaagaggtacattaattgatgttatagacgatgaatgttttcttaatgatcctattgccattatgcggttatttttacgtatggcagagcatgcagagataaccggaatttattcgaccacactacgccatttgcgttatgcccgtcgtcatttagtacaacctttatgtgagtaccaactagctagacaagtatttatgcaaatcttacgtcaccctagggcggtttcgggggcatttgtcccaatgcataaacatagtgtattaagtgcttatttcccacaatggaacaatattgtcggtcaaatgcagtttgatctattccatgcttatacagttgatgagcatactatccgtgtattacaaaaacttgaaagtttcgctgatgatgcaaatcgaaaccgacatcctctttgtgtcgatatctacccgaaactacctcaaattgagttattaagacttgctgctctatttcacgatattgctaaagggcgacatggtgatcactctttattaggtgcacaggatgttattagctttgctcaacaacatggactaaatcaacgagaaatcgctttagttgaatggcttgtaagtcatcacttacttatgtctgtaacggcacaaagacgtgatattcaagatcccgatgttatcttccaatttgcctctgaagtcaaaaatgagagccgtttacgctatttactctgtctcactgttgctgatatttgtgcaacaaacagtagcttatggaatagttggaaacaaagcttactgcgtgaactatttctcgctacggccaatcaattacgccaagggatgcactctattccagatttacgggaacgtatccgtgatcaccgtcagcaagcactaactattttacaacagcaacaggtcgatgaagaaaaactgcaagcgatttgggctcgttgtcatgcggactattttttacgtcatactccagagcaaattgcttggcatgctcaggcacttattgagcacaatagtgctgagcctatggtattgattagccaacaaaccgagcatggtggtacagagatatttatttggtgtgctgaccggccttctctatttgcttctgttgcaggtgagttagatagacgtaatttaaatattcacaacgcacaaatttttactaatcgcgacaatatggcaatggatacctttatcgttttagagcctaatggtaaaccactggcgattgatcgctatcatgctatacgccaagcgcttattcgcgttgtatcagccccttataacgccaatgccaaaacccgtgctttaccggctaaattacgccattttgaggtacccactaaaattaactttatcgcctctaaccataataaacgtacttatatggagttatttgcacgtgatcgcccaggcttattagctattataggtaaggtttttgccgatctttctctttcgttacatggcgcaaggatcaccactattggcgagcgtgttgaggatttttttgtattaacagataacgaaaataatgcgttaaaccaaaaaatgaaggatgaagtcgtagaaaggttgacaaaagccctcgtttcaaaggataaaatatagaaacccacgacaatacatataggaaatactatagatgcaagcattacaatctattattgataacgcctttgaacaacgcgctgaaatcacaccagataatgttgaaccacaggtacgcgatgcgattaataacgttatcgctcaactagacagtggaaaattgcgagttgctgagaaaattaatggtcagtgggttactcatcaatggctaaaaaaagcggttctactctcttttcgtatcagtcacaatcaagtgatcgacggtagcgaaagccgttattttgataaagtgccaatgaaatttgcaaattacgatcaagctcgttttgaaaaagagggatttcgtgttgtgccacctgctgccgtcagacaaggggcctatattgctcgtaatacggttctaatgccttcttatgtcaatattggtgcttatgttgatgaaggaagtatggtggatacatgggcaaccgttggttcatgtgcgcaaattggtaaaaatgtccatttatccggtggcgttgggatcggtggcgtattagaacctttacaagctaacccaaccattattgaagataactgctttattggagcacgttctgaaattgttgaaggtgtgattgttgaagaaggctctgtcatttcaatgggtgtttatattggacaaagtaccaaaatttatgacagagaaactggcgagatccattacggccgtgttcctgctggttcagtggtggtttctggtaatctaccttcaaaagatggtcgttacagtttgtactgtgctgtgattgtaaaaaaagtcgatgctaaaacacgtggaaaagtgggtattaatgaattgttaagaactatcgactaatataataacagcggatagaatgaattctgttcgctgtatctcattcatctttctatctggtgccaatatatgtacgataatttaaaaaatttagggatccaacatcctgaagatattgatcgctataccctacgtcaagaagctaacaacgatattttaaaaatttattttcgcaaagataaaggtgaattctttgcaaaaagtgtaaaatttaaatatccacgccaacgtaaaacaatttctgatactcaatcaggacaaggttttaaagaagtcaatgaaatcaacactaacttacgttatgtgattgaagaattagatcaaatttgccagcaagatcaagtggaagtggatttgaaacataaaatcctcgatgatttacgtcaccttgagcacgttgttgccaataaaattgctgaaattgaagccgatttagaaaaattgactcgtcgttaattaattgtctcaattttataataaacaccgcttataactattcacaacttaatagtaagcggtgctctttaataagatagccatgatccatcaaattattgctcaagtaaccgattaatttaattcaataatgtagcccagttttccagccaatttatagcaaatacttctggctcggcaatatccatactgtctatttttaatatttcaccaatacgctttgcttgatgctcttgtaataacgcttcaaattgcatacctgcaccacaaaaattatcgtaactgctatcacctaacgcaattaggccataatgtaaattaggttgataaccaacattatctcgtagctcataaaataaaggtgctattgtatcgggtaaatcgccttggccggttgtagagcttatcaccagtactgttgaatatttttgccaatcggcaagtgtaccttcttcatagatattagcttgatgtttatgctcaagcaaaatgcgctgcgcttcttcagcaaccgccaatgcattgccataaacagtaccaacaaaaatgccgattttagccataatgtcccctatttcatttatctataatcatagtaaatcgcatactatattattgatatacaatttatgctctatatttcttctctctttctctctacaataaatgatctatctacaataaatgatttataaattttattccattctgtgcgctctttagagaatcgccaaaaaatatcatttctaggcattgattcatttattatttttgctactaatttgcaagtccagtcaggtacataattatttttaaaatctagagattcaagcaaaaggaataaatccctatccaatatttctaattttttaacagcattatcatttatctctttttttcttaggtatttgtttttaaataataatttatatagtttaaggaaaaaacctttattttcctttaatgatttattataagaagataattgagaaaacatatcttttatattattaaaaaaaacctttttaaaattaaaattaatctcgttaactgtagtaaaattagatttatctgcttccttataaaaaaaatataactgattagatttaaaaccatccatcttttttataatttcattaagttcttcaattgttatttttatgtcacttaactctatctcaatatcttttttagataaaaactgactatctttgttaaagacattacatttttttaccaaagtttcaatagacattttgaattggtcaatgaggtcggaattacaagtaccattatcagttttagaactaattaaattagatagattatctatatactctacagtttttaataacccttggctagaagtagctaacaactcattcattttctgtttatctttatcaagttgttccatcagggctgctttttttgattttttggttttttttgagaggtctgttttttctgttttttcaaaattatttttattatgagaatcatcttttgttatatcagtattctctggttccttaaaaattttattcgaaatagtaattatattttgatatttatttacattattatataatgtaaatttaggtttacgcataattttatttgcaatattttctatgtcatcagaaatctttttttcttttttagagataaaactattaattatagtatttttattactaaatattttattaaaaagtgtactagaatcatctttattctttaacaaagaggaaaataatacatttatatcattagcatcttttattcctgatacaattaccttattatcaagtatttttattttatcagttaatctttctttttcaataatatcttttaatttcttcagcctatctttttttttatttttttcaagtatgtatttttccagagcacatttcaactctaatgtaaatttaagaaataaaacttctttatctttattaacaatcataaagtctctattactattgcttataagtaaagataaatcttttattcctaaagaaatatcatcttttcccaaagagatgttttttttattccctatagagagcacaaaagttttatattcatcatcttttccaaataatttcattgtcatttaatctcttaaactctgtttatgttctaaaataattacataattaacacctatattatttcaataaaaaaacactcttagctgatgcataagagtgttttctaatttagtcaaaaataatttatttttcagttgtacctatagaccgaatatattcatccatttcagtttttaaattatcagacttagggccaaaaatggcttgaataccggatccaaccaccacaacaccagccgctcccagtcttttcagctcatcacgatcgaccttatcaatctcttttacaccaatacgcaagcgtgtaatacaagcatctaagctactgatattatctttaccaccgaaagcagcgactaaagattgtcccatcgcacttttatccgcttgtttcgcgtttttatcttctacttctcgccctggggttttcaggtttagtttcacgattaagaaacggaaaatagagtaataagttatcgcataaagtatgccaataattgggaatagatacagtttactgctattgccactcaatacgataaagtcgattaaaccatgagaaaaacttgtaccgtcacgcatacctaacaagatacaaataacaaatgctaaaccggcaagaatggcatgaataacataaagaataggtgctacgaacataaatgagaattcaattggctctgtgatccctgttaaaaaggcagtcaatgccgcagaaatcatgatcccgccaacttttacacggttttcaggacgtgctgtatgccaaatagcaatggccgccgcaggtagaccgaacattttaaataggaagccacctgataacatccccgcagttggatcacctgccatataacgtggaatatcaccgtggaacacttgtcctgcgctatttacatactcacccacttgcatttggaatggtacattccagatatgatgcagaccaaatggcactaacgcacgctcaacaacaccataaataccaaatgcaacggctggattttgatacgcagcccactcagaaaaacgttgaatagcagtaccaataggaggccaaataaaggataaaagaataccgacaaaaatcgcaatcagaccagaaataataggtacaaaacgtttacctgcaaagaagcctaaatattcaggaagtttaatacgataaaagcggttaaacattgatgcggcaataataccggcaatgatcccaccgagtacccccgtatcagttaaacgttgtatttcaacactatcaggagataatcctaagacccaaggtgccaccaccagcatggtttttgacataatgccataggcaacgacggacgcaagagctgagacaccatcattattggtaaaacctaacgccacaccaatagcaaaaatcagtggcatattagagaaaaccgatccccccgcttctgccatcacttgagaaacagagacagggatccatgatagtcccgcagacccaacccctagtaagataccggcaataggtagcacagataccggtaacattaaggattttccaattttttgtaaaacaacaaataggtttttaaacatcaagcagactcccgaatatgggttgtatgtgttataagttttttatttgtttaaagctaaggtaggtttattcaattaacttatctaataataagctctatttattttacatcataaaataaatctattattgaatatatgatagctgtcacgtttcagttcatatcttttatcaataaaagtaactttttatattacaaccagttattgagcaataaatattgcgcaaactatcaaaacttaagtaaataagtcttgatagtcacgacaggtaagcaatattcaaatatcagaaagtacaaaatggtgagctaaatcctcaccgaattgctctaattcgggctttagaccacgccagccaaactgattaatcagatgttgccatggcagatcccacttcgctgttaagttaagtggttgttgagtgatcggatgaattaagtttagctgacttgcgtgtaacatcaaacgatgtgattgaaaatgatttacgaccccacgattttgtcgtaaatcgccatgggctgtatccccaataatagggtgacgaatatgagacatatgacggcgcaattgatgcttacgccccgtttcaggacgtaattccaataagctaaaacgcgatgttggatagcgccctatcgccacttctttttccacttttgcaagtggcacacaatgcgtaatacagtgttgaattttaggaggttgagaggcaaatttgtcagcgattttgtcatgctcttcaacaagtggactatcaattatcattggctcttcaacatagccacgcacaactgcatgatacactttctccatttgatgttgttcaaaacagactgaaagtgttcttgcaacctcggaagagagcgccattaatagcactccggatgtgggtctatctaaacgatgaacaggaaaaacatgctgaccaatttgatctcttaatgtttgcatcacaaacacggtttcatgcctatcaagccaactgcggtgaacaagccagcccgccggtttattcaccgccacaagatattcatcttgataaataatatctagcatcattgaccttattgcttaaataacgcatcaagttcacgaaggtgattgagtaaatccacataatcacgcgtctcatcgtccttaaatgcttcttcataataaggtgcgatagcaaaagccgtcggcaatgccataccactgtcaataagagaagataaacgagggatcagaacccattgcaaccattcatgcgcctccattgtatcaatacaaaaaggctctgagcttgcaaaagcctcatcattaggcgcatccaattgccataaccctatgtttttcatctcttcttcaattaataacagtcttgctaaaatgtgttgttctgaggtcattgtttattccttacataaaaacagaataagcataacattggggctgaaagagtgaaaaacaaatagaaaataaaggggccgtagcccctttagacaagaagatatgattatctaatataatacctgcatcctagcagaaccgttttattgtcatctgtcatccatgatgatgaaagtctatatcttgtattaatggaaatatcctatttcctacatccttgattactttctttatcacggttaccaaataatcccttagttggcggaggtagaatgccaataattggttagtgaaacaacccacaaaacaaaggtaatcaataaagaaaaaccatcacgaaaaacaatgtatgattaatccattgaaattatttaacaaacaaaaaaatcattacgcaacatttgcatttagtaagctaaagacactctttttgtaagatatatctcacagaaaaaatagctaaatgattaccttacttatcaaaaacaggggttaattttgttaaaaatagtgataaattatctgcaagcacttcccttttcttttgaccaaaagtttctagtattacttcacctgaaagattacatacagaaataatatcgttttcagacgctgttgtaccgataaacaaagtcggggtgagcttcaatcgtttttgtgtcacaagatgtccgatcatgttctcttgtagacgaataaaatcctcttcactccaaatttgaagcagagtaaagttgagcgaatcaaaacggacttgcatatcaccagcatattgcgtagtaaaatagtcatgtaattcagagcgaataataatccccatcgctttttcaactttttctaatttatctcgacccgtaaaaggctgtggtaaccaataaaccacattatctccggtacgagaaatacaaggagaaggaacaccataaagctcatggctggcaggaggaaaccctgactcttgttgccataaatcaacataattttgcgtaagctgttttaattcagtggaaatatcattcatcgttatcatcgtctgtaggcataaaaaagagaaatatatcccttatgttacctgataataccggtaattttgagcgccaataataaagcgttcatatactcttgatatttcgctagtataatcacggctctttccattttttgatgacattaggatatcgattatgtctttatatcagggagataaggctctcgaagcactatcattaggcaaagaaacacaataccacacacactatgatgcgagtctattacaaggtgtacctcgtcgcttaaatcgagattcactctctttaactgctgacaatctaccttttcatggtggtgatatctggacaatgtatgagctatcttggctcaacagccaaggcttacctcaagtggctattggccatgtagaattagatgcaacgacagaaaatctcatcgaatcaaaaagctttaagctctatctcaatagctttaatcaaactcgttttgaaaattggcacattgttgaagaaacattactcaaagatttaactgcttgtgctaaaggcagggtgcatctaacgctttacccactttcccattttacctcacagcctattgtcgattttgtaggagagtgcattgataaccaacctattgaaattgataattaccaattcgatagccaatggttaaacggatcaacaacagatacactggttgaggagacgcttgttagtcatctgctaaaatcaaattgcctgatcacgcaccaacctgattggggatctgtgatgatccaatataaaggcaaaaaaatcgaccgtgaaaaactactacgctatcttgtatcctttagacagcataatgaatttcacgagcagtgtgttgagcgaatattccacgatattatgacattttgttcaccagacacattaactgtttatgcaagatacactcgccgtggaggattagatattaatccttggcgtagtaattgtgagtttgttccagaaactggtcgcttagccagacaataacgtgaataatgcctgtatgttaatatgatctatgttatacagagatcagttgcacttcagtttgttatttcgggagaaaaaggagtcctacgtgataactcatgtcagcccattaggttccatggatctgctttcacagctagaagttgatatgcttaaaagaacagccagcagtgatctttatcaactgtttcgtaactgttcacttgcagttctcaactctggtagccttactgatagtagtaaagaactgttatctaaataccaagattttgatattaacgtactgcgtcgcgaacgtggtgtaaaattagagctagttaatcccccagaagatgcctttgttgatggaaaaattattcgctctctacaagcaaacctatttgctgtactgcgcgatattttgtttgtgcatgggcaaataaccacggcaaaacgcgacctacatttaaaccttgaaaacagcacccatataacaaacaccattttctctatcttacgtaatgcaagagcgctgcatatcgatgaagatccaaatatgatcgtttgctggggcggacactccatcaatgaaacagagtatctttacggtagaaaagtcggtaatgaattagggttacgcgaactgaatatctgtactgggtgtggacctggggctatggaagctcccatgaaaggcgctgcagtggggcacgctcaacaacgttatagaaatagccgttttattggtgttacagagccatcaatcatcgccgcagagccaccaaatcctctggttaatgaacttatcattatgccagatattgaaaaacgtctggaagcttttgttcgtattgcccacggcattattattttcccagggggcgtaggaaccgcagaagagctactctatctacttggtattctgatgtcaccagaaaaccaagaacaagtactcccactgattttaacgggtcctaaagagagtgcagactatttccgagtactcgatgattttattgttaataccttaggtgaagatgcacgacgtcattatcaaatcatcgtcgatgatgcggctgaagtggctcgtattatgaagaaatacatgccattggtaaaagataaccgtcgtagcacaggggatgcttacagctttaattggtcaataaaaattaatgcggacttacaacatcctttcgagccaactcatgaaaatatggcatcacttaatttaagcacgcatcaatctcctgaaaaactggcggctgatttacgccgcgcattttccggtattgtcgcaggtaacgtaaaagaagtgggaatgaaggcgatagaagctcatggcccttataaaattcacggtgaaagcgatattatgcgccgtatggatattttattggcggggtttgtcgaacaacatcgtatgaagctacctggtggtagtgcctatcaaccttgttacgagatcatcagctaattaattatggtacatttgctgatcattgatgcattaaacctgatccgccgtattcatgcggcatcaggttcttcatgcctgacagtgtgtgaacatagcgtgaatcaattgcttaatcacacacggcctactcacgcggttgctgtttttgatgaagatgatagggaaaatagctggcgccatcagttattgccggaatataaagcaggccgctcgccgatgccggctgatctgcaccaacagcttccagaaattaaagcaatgctacttaacttaggtataaaaagctggcattcaggaggcgatgaagcggatgatgtggccgcaactttggcaacaaaagtcgctcaagccggacataatgtgaccattatttcaacagataaaggttattgccaattactttcccctgccatacgtattcgtgactatttccaaaaacgctggctcgatcttgaatttattaatcaagagtttggtgttaaaccgacacaattaactgattattggggattaacaggcgttagcagcagtaaagtttccggtgtccccggtattggccctaaaagtgcaacagaacttttgcaactttatcctaatttagagtcactgtaccaacacattgatgaagtgcccaaaaaatggcaaaccaaattgagtgataataaagaagttgcttttattagccgccaaatcaccacacttcgtactgatattcagttaaacggtaatttacaacagttacgtttaaaatagtttaatcaataaaaaggctaacgctctgtaatagagaattagcctgttaatgatttactcatcaaaagatgaacttaactctatgaagttaaaactcgcgatcaggacgataagcagcccagatattttggatatgtaccgtgatctcttctctgtcatgatacaaatgcttagcctgaattttagcattaatgcctttctcagctaattcagctctaattttatcaaggatatgcgcaacttcttcataacgctttttcatcggtaattttaagttgaagattgcttcacgacaccattcattaactatccacgttgtcattaatgcagccactttggcaggcttctcaaccatatcacacaccagccaagtaatattctttgacgtcggctcaaacttaaagccatcagcttgatggtggcgcacttgccctgtttccattaaagaaggagccataggaccattatcaacggcatgcaccatcatgctacgtttaactaattggtaagtccatcctccgggacacgccccaagatcaaccgcactcatcccactggctaagcgctcttcccactcttcataaggaataaaaacatggaacgcttcttcaagttttaaagttgaacgacttggtgcatcggctgggaattttaagcgagggatccccatatagaatggcgagttattaaagctataggaatagcccacgtaacaacatcccggagcaataaaaaagacatggatcaccggacggctataattttcaacttttaataagatcttttctttacgtaattgattacgcaaaggaacagtgaatttgcggcaaaattttaataactctttgctttcattggtatcagcgacttcaacacgtaactcacctgctttttctgtactaccttttagctggtcaataatgggagtaatacgatcttctggtggtaagttctttaataattcaccacaaacaaataattggcgtgcaaaaataagtcctctaaaatccacatcacgagcaattttatctgcatcaccttcttgatagcattcaaaaatgacgtaaccacttccctctttcactcgagaaaagccataaacacctatttgtcctgccttatccgttatctccgccgcgcactctttttcaaaaccagggcgacaatataatgctactttattcatggcgagatgccggtgtccttagacgcaaagcgccaataaaaattaaaatccaaccaataagaaaactaaatccaccaattggcgtaaaataagataataacctaacctgtgttagcgccatacaataaaggctaccactgaaaagtaaaatgcctaaaccaaagaaaatacctgcccaataaagccataaaatggttttgcgcattaatatcgccgctaaccctacaagtagtaaagtatgtacgatttgataacgcatagctaactgaatatattcccaatgctgtggcgataaatgaggggctaatttatgggtagcgaatgccccaaaagccacataaaaaaaaccactgattgcggaaaacataagcaatgtacgactattcactgtttattccttcctgttaggagctaatttacctaaacaaatattaagaagttgccagtaatcctaatttttcctgttcatttgccgcttgagataaaatccattgacggaaagcagcaatttttcctaattcagcctgactatcttggcaaactaaataaaaggcatttttactgacaagcacatcttgaaaaggcctaactaatcgacctgattcaatttcactgcgagccataacattattaactaatgcaacaccttgtccatgtactgcagcctgtatcaccatagagctatggctaaagataggcccttgttgcacattaatctggttttggatctccaattgacgaacataagcttgccaatcacgacgcgatgtatcatgtaacagtgtatgataaatcagatcggacggggtttttagtggtttttcacctgtcagcaaagaaggagcacaaaccggaattaaatattcagcgtaaagacgatctgtacgcaatccagtccagttcccgcggccataaaaaatagccacatccacatcatcagcaagcttatcttcttcgcgatcaaccgcctgaatacgaacatcaatccccggataagcctgattaaaccctgataacctcggtactaaccactgaatagcaaaactcggcgacaagctcactgttaaagccccttttgcgcttcgcgcaagtaattttcttgtcgcttcattaattgaagagaaaatttctttgatatcaagataataactttgaccttcttcggtcagtaacaaagaacgattgcgtcttctaaataattttagtccaagaaattcttctaatgttttaatttgatggctaaccgctgcttgagtcacgaataattcttcagccgctttagtaaaacttaaatgacgtgctgccgaatcaaaaactctaagggcatttagtggaggtaaacgtttagacatattctgttgtgaaacccctattttggctgttggtaaaccctaacgttagttattagttttttttatgcgaagcattataatttgtcccttgatgattagccagtaaatacctatagtactcgcacttcctaagccggaacgaaaagttgtgtagtagcaatactgcaaaacttttggctttgtggttgtgatgttgtgtttgcaagttgtctggaaattccagactttgtagctgatgctactgttttttttcacttcctgtacatttaccctgtctgtccatagtgattttataatgcaccgccaaggcggtgctttttttatatataattttactctaacttcgtaacgctgacggactgcacatcctatttttatgctaaatgcgcacctacttagctattattatgctaaaaaagtgtaacatcttttccccataggcaataacagcgctgagtagataaacatctattccattttcgatgctataaacaagctcacctttatcgtgttaccataaaaatctatcgcaattcacagtaaacaaattagcaatttcattataaataaatattattaaccgtataatctcgcggttagatttttacttactataacggcgttttctagactgactaacacaagctcattatgaaaccattttcccctactgtttttcgccaacaatttcctgctattgaggaaaatattgtttatcttgatagtgcggctaccgcattaaaacctgtagctatgattgaagcttcagatgaattttatcgccatagctcagcgacggttcaccgtagccaatatcaacaagctaaaaagatgacacaacactttgagcaagcacgtcagcaagtcgctcaattacttaacgtcgcagatagcgatactattatttggacgcaaggcaccacaggctcacttaatcttattgctcaaggctatttccgcccacgattacaagccggtgatgaaattattgttagcgaacaagagcatcacgccaatcttattccttggttaatgttagcagagcagactggggccaaaattattcgctggccgattgaagataactttttaccttcaatcgccacactgacgacattacttacggcaagaacaagagtagtggcaataagccaaatgtcgaatatcaccggtgcacaaatcgccttagataaagtttctcaatgtgtacatcaatatgatgactgtttactcgtggttgatggtgcacaaggcatagctcatcatgcaacggatatcagcgcccttgatatcgatttttatgctttctctgcccataaattatatggtcccaatggccttggcgtatgttatggaaagcgcgaacttttagaagtgatgtctgcgtggcaagggggcggaaaaatgttaaccacggcaagctttaacggttttgtacccgcggctattcctcatcgctttgaagcaggcacccctaacatagctgctgtaattgctttttcagcaacattagattggttacaaacgcaagatatggcgcaagccaatcaatacgccttaactctggcagataaagcacaggcgcgtcttgagcaactggagggttttatcagctaccgcgcgcctcattcaccggtactcgcttttaattttgagggtattcatcacagtgatttagcggcattaatcgcggaacaaggtattgctttacgcacagggcaacactgcgcacaacccttaatcgatgctttaaccatctctggctgtttacgcgcttcttttatgccatataatcaactttctgatattgataggttagttgatgcggttaaattcgcactgtccttattaaaagatgaagattaaatatgaataataatacacaacacccttttggtcatgacattaccttagatggattatttcaagacttccagaaatctaaatcatgggaagataaatatcgtcaattgatccaactttcaagaaaattacccgcattacctgatgaattaaaaacaacagaaaacgaaatcaaagggtgcgaaaatagagtatggctaggtgttgagttaaacaatgacggcaaataccatatttatggtgatagtgatgggcgaattgtaaaaggcttactggcggttattttaacaacagttgagaataagacggcacaagaaatagccaatatcgatatattagctatttttgaacaattaggattgactaatcaaattagccaatcacgcactgatggtgtcaatgccattattgcgcgattaacgtcgctgacacagacatctcaaccctaacaagtcaatgtgtatagcttgttgtatggtggatcaatacgcttaaatgctccaaagtgcaactaggtgactagtgcgattgagcaccatcaacaacgcgacaacttgaagtatgacgagtacgttgcgccttagctaacatcttctttaatacatgagaaacggcaataaaaccaaaggaagcggtaaccattgtcaccgcgccaaaacccgctgagcagtccatacgcttgacaccatcggcagtacttttggccgcacacaccgtaccatctccttgagggtagactaattgctcggttgaaaaaacacaatctatgcctaatttacctttgctatttttcacaacattaaaatcagattttaaacgctcacgtaatttagcggctaatggatcttgaatggttttcgctaaatcgacgacttggatttgagttggatcaatctgtccgcctgcgccaccagtggtgataacaggaattttatagcgacgacagtaagctaataatgcggcctttggtctaacactatcaatagcatcaatcacataatcaaatgagttttgcatcatttctgccacattatcaaccgtaacaaaatcatcaacacaagtaactttgcattcaggattaatttgcaaaattcgctgcttcatcacttcacatttaggctggccgacatgctcttttagcgcatgaatttgtcgattggtattggtgacacacacatcatccatatcaattaacgtaatagcgccgatcccactgcgagctaaggcttctgcagcccagctaccaacgccaccaatgccgacaacacaaatatgtgcctgagaaaaataatacagcgcttgttgtccataaagacggccaataccagaaaagcgttgcagataggagtctgataatgaattttgcataatgcgataacaacctagatagcagaaataatcatggctattgttaatcaatagccatggcgtttgctcattttaccgttaatatgacaatataaatagtcaatcgttttactgtatggggttcagtaaggtgggttgcgatttttttaatacccatacacgtccataatgattataaaaacccgccatttgtccggcttctttaccaataccatgataaatatcgaaatgatgtcctttaatggctccccccacatccaaagcaaccattaaacgcatttggtattgtccagtaaacttaccggtattatctaaaatagggatttccgctaataatacggttcctgcggggataatacttctatcagaagccactgacgctttagcaatcagcggaatagcacttgcccctcttactggcgtaaaaggttcaggtttaaagaaaacgaaagaggggttctgttctaataattttctgacttcttgttcactatgcttatcagcccactctctaattgccaacattgacatcgcttctttttcaacttcaccattatcaatcagcactttaccaatactgcggtagggatgaccatttttcccagcataaccaaagaaggttaaaggtttaccatcaccataatcgacatagccactgccttgcacttccatcataaagttatccatgatggagttactataagcggcaattaaagtgggacttaaagcaccgttatagatagccgctcgtgaaggcaatttaccacgcactttggctggcatgcggtagagcggatatttaaagtcaccttgtggcgttaaacgtgcttctaaaacaggggtataatatccggtaaattttacattcccataattatcttccccttccatttgaaaggctgcgatattaaattgacgtaattgacgcgtatctgcccctgagcgtaaccaattttccactgcttgataagtatcttgattactattgtatagacgtgaagatgtttgatttatttggttaatttgttcaaggtaatctgaaccattaatgggcttgccttgcgtatttggcgagttaacttcaataagatcttgcttaagcttaccatctttatactgttgtccctgatctgttggacgatggcagcctgttaaggcaagcgctaatatccccaaaagaaacgattttcgccaagtaaccattttttacttatattcctactttaaaaagagttgatgacaagaaagataccaaagccaaatcaagaaagatatcgatacagaagtggttgcagtttttttaattatcggcttcaccatttagtgtgttatctaaagtataactgtctaaaattacacctctgtgtattatttctgaccgtttttaaaagaaaatggcaaaaattacataaaaaacttgcaagttatcagatcctgagtatagtgcccctctgtggagacgcggggtggagcagcttggtagctcgtcgggctcataacccgaaggtcgttggttcaaatccggcccccgcaaccaattcacaacatatgcagtaagttaaaatttatagattcagtcgcgggatggagcagtctggtagctcgtcgggctcataacccgaaggtcgttggttcaaatccggctcccgcaaccaatttctataaatgttttcggacgcggggtggagcagcatggtagctcgtcgggctcataacccgaaggtcgttggttcaaatccggcccccgcaaccaatcctttcctaattttattttctacaaattcccattaaatactctcttaatccctactctatttacaataaccaatatactccctgttactgagttatgatttaacttattgggtaaaaaataataagttgttacctctagtagaaaataactatttatttcccactagaagtctcaaaaataagttgtagttgtatagcgagatcagcctcgatcagctaatgtcagttcaccaccattagcaaaataggctttaatacctttgaaaatagattcagcaacttgttgctggaatttagccgttttgagctttcgctcttcttcaatattactaataaaagccgtctctactaaaatagaagggatctcaggggcttttaaaaccgcaaatccggcttgatcgaccttatttttatgtagcttattcacgccacctaataattttaatacctcactaccaaattttaggctgtcattaattgtcgcggtctgtactaaatcaagcattgcgtgatcaacatagcgatcaccacttcgactcaccccaccaattaaatccgcttcattttgggtttgagctaggtaacgtgcggtattacttgttgcgcctgttttggatagcgcgaaaacagaagagcctctagccgagcgattggtaaatgcatctgcatgaatagagacaaagagatcagcctgcattttacgcgctttcgctactcgcacttttaaggggataaacacatcctcattacgcgtcatataagctttcattttggcatctttatcaatcaaagctcttaagcgacgggcaatttgtagtacaacatctttctcacgagttttatatttccccatcgctcccggatcttcaccaccatggccggggtcaatcatgataataatcggcctatctcgtcctgctcttccgggcttacgcgtatccgtttgttcaggcactgcttgttgtaaatccccttcgttatattcacgcaatagcgctaatagcggatcatcttcactcgtcgccgcatggcttggatagaaatcgagcactaagcgatttttaaattcagcaacgggttttaaagtaaacatttgtggctgaacgggggttttaatttcaaacactaaacgaaccgtagttggggtattttgaccgacacgaataagttttaagtaaggatcgtttgtttgcacttgactagccatacctttcagaacgctattcagttggataccttcaagatcaaccacaattctatctggtgctgataacgcaaactggcgatatttcaagggtctacttgattcgatagtcacacgtgtataagtcgatgcaggccataccctgacggcaaccactgatgatgttgccgctaagccaacaggactaacacttaataacaataacgcgccaattcctttaataagacgacgacgtgtttgattatgttctgaatgactcatgaaaatattccaaaaaaaacgattaacatcaaaaagtgctaaaacagacggtcaaaaaatatctgaacgaaaaactttaccgaatccacacttcactgtcacttaaaaacagcacaattacacacttttatacaaatattctgccttctgttaaaacagtaagatcggattttacttgccatttccgctcaaaaagaataaaaatacattaaatgcgaataaaaattcacctgagaggggctttatgaaagagcgtagcaccgaattggtcgatggttttcgacactcggttccgtatattaatgcacatagaggtaaaacatttgtcattatgctagggggagaagcaatagcccatgagaactttccctctatcattaacgatattggtttattgcatagtttaggaatacggttagtggtggtttatggcgctagaccacaaatcgatgtggctcttgaagagcaaaaaatttctccgctctatcataaacacacacgaattactgatagtaaaacccttgaagtagttaaacaatctgccggtactttacaactcgatattactgctcgtttatcaatgagtttaagtaatacgcccttacaaggagcgcatattaatgtggttagcggtaattttgtcattgcccaacctttaggtgtcgatgatggggttgattattgccatagcggtaaaattcgccgtattgatgaagaagccattcatcgtcagttagataaccatgccattgtgttaattggccctgttgccgtctctgttacaggggaaagttttaatttaacctctgaagaggtcgcaacccagctagctatcaaacttaaagcacaaaagcttattggcttttgctcttcgcaaggggttgtagatgcaagtggccagattgtgtctgaactcttacctaatcaagcagaagaacgaattcaagcattacaaactacaggcgattatcactcaggtactgtacgttttttacgaggtgcggtaacagcctgccgtcgtggtgttgagcgtagccatttattaagctatcaagcggatggtgccattgttcaagagttattttctcgtgacggtattggtacgcagattgtgatggaaagtgccgagaaagtccgtcgcgccaatattaatgatattggtggcatattagagcttattcgtccattagagcaacaaggcattttagtgcgtcgctcaagagagcaacttgagatggaaattgatcaattcactattattgagcgcgataatctcaccattgcttgtgctgccctctatccttatcagtctgaaaaaataggtgaaatggcctgtgtcgccgttcatcctgattatcgtagctcttgtcgaggtgaagtgttgttacaacgcatatcaacccaagctaaacagatggggttagataaattatttgtgctcacgactcgtagtattcattggttccaagaaaaaggctttacgcctgctgaaatcgataaattacctattgaaaaacaggctctgtataattatcagcgtcgctctaagatcttaattttagatctacataaagagtagttttattaataaagtaaaaaagacaggctccccctctcaaagcctgtcttttgctatttactataataatattaattcgtattaacttaaaaaatcactcagtaacgcagtttttcaactaatccactgcggcgttgaatacgtgtctggatcgccattttcaccatatattcagaagaataaagtgatagcttctgcttggctcgcgttatcgccgtatagagtaattctcggctaacaataggagaaaattgtgttggcaacaccagtgccgtatgggtaaattccgaaccttgtgatttatgtactgtcatcacataagcagtctcatgttgcggtaaacgactaggttggatagctttcaatgtgccatcaggcaactgaaagaaagctttcatttctccttcatcgttattaagcataatgccgatatcaccattaaatagccccaatgtgctgtcattacgctggatcataattggtcgtccaatatactcccgctgataactatttataggtcgtcgtatcaagcgttggcgatgtaacagcatctcaatacgttcatttagtcctgtgacaccaaaaggcccttctcgcaaagcgcacaataaacgatattgattaaagctatgaagaatagtctctggtgctgctttttgcgcgactaacgatagatagtgatgataagccttagcaacatcttgaagcatcttcatatagctctcatcggtgtctaatgagataaattcgatgtcctgcggatcggtatgtttttctcgctcagtgctctcttgtgttactgtcgcttttttcagtaacgtcatagcactcttcacttgtccttgattaaccgcaaaagctaattgaccaatacctgaatgtgagccaaaacgataacttttacgcagtaaacatagtgaatcactgaccaccgaaactggcgtagtagaagtcgtcatagaagcgggatctttctgtaattcaccttgtgttaagcgatcaatctgctcaaaacggcgttggctaaacccctgatccgcaaaacgacaaatatcccctaaaacggctcctgcctctaccgaagcgagctgatctttatctcccagaaaaataacatggcaatgttccggtaaggcctcaattaaacgcgccatcatcggtaaatccaccatagaagcttcatctataaccaagatatcaagttgtagcggattatcgcgatgataacgaacttgctgactttccggttgggcacctaataagcgatgaatggtttgcgcttgatcgggcatccattttaactcttcttcacttagtgccaattgcgctaatgctttacctaatgattcggtcaatctagctgccgcttttcccgtgggtgcggctagttgaataatgggtttttcattcgccgttagcatgacaaaagcagctaaaatctttgctactgtcgtggttttccctgttcctgggccacccgaaataatcgaaatagagcttgtaatagcaaccgctgcggcgactttttgccagttagtttcagcatgtgttttaacgcttgggaaaagttgatttaatacgtttgttaattgattttcatcgatatcaaccacccgttgctcttggcgaaaaaattgcgcaatttgctcttcataacgccacattctttgtagataaagtaatccgttatcgagaataataggtgaaggtaagtcactatggccttgattaacacactcgctctgattaagctctgccagtatttctttcgctgatggttgcgccatttcctgccaaatggcttgtgaaagctcggtgtgtcgcccatcaaacaatttatcttgttgtatgatatttaacggtaagcaaacatggcccgcccctgtttgagcactgagataggcaaaaataaacagtaggataggattttcatctgccaccagcatttgagcaaaacgtaaatctaacgggcgcaataggttttgtgcaattgcttgttctaataatttaatcatttgaattgttctcacccagcacgttcactttactgccgttaacctcaagcgcttcccctttaaatagcgcatctaatgcttctacaaacttttcttcaggtagataggtatagacgccattgcccgggtagtcagtatcaatgccacgtaagaagagatagcagatcccaccaaaatgacgttggtaatcataatcaggtaagcgttgttgtaaaaatcgatgtagcgctaaagtatagagttgatactgtaaatcataacgatgatcgcgcattgcattgctcatcgcctcttgcgtgtaatcctcactcgattcaccaagccagttagatttatagtcaaccacataatacttgccctcccaacaaaatactaagtcaataaaaccttttagcatgccttgcacttgctgaaaattgagggctggacattgcgcagataaaggatcgtattgacgggttaattctgttaactgtgccgccgacatctccttttcaataggcagatagaattgtagctcatcgagttgatgctccttaggaatatcagctaaacataagccttgcgcatttaatggggtgtgaaaaagggtttccatccaagccaccaacaatggcgtccatttttcctcaaaaccttgggcaataagttgctcttgcatccaactttcatcaataggctgtgaaaaatcaagctcttcaagcaaactatgtaaaaatgtccccgcgactgcaccacgagggaagtgatgaatagagagttcatcgctgtgttgcgctgttttctcacctttagcatcggtatctaagcccggtgcgatagattgtaccaaggcatccaaatcagcactatcaaatagatatccacgagcagagtgttgtgccgttaatcccgaataactggtgatacgccaattatcattaatttttcgcttaaatatggcggcatctaaagcaatatccgttgtatgtggagattgatatcgatgcgttgaggtatcacctaacgtgatcacttttatattgtcatcaagcaattgattaatggattgatgtaatagctcactattaccctcttccccatgctgcaacagatatcccagcgcatttttatgcaaatcagttaatcctgacttacgtttatttcctttaaccaaaggcgcaacaccaacataacaacaaaatttcgcccgagttaatgccacatacaacaagcgtaaatcctctgccagtcgctcttcatcagcaagacgcacgctatcaggttgattaaaaatatctaattttgcgtaaaattcatctctatcatgataaagcgcgcccttttgttcttgataattacaggcaaaaggtaggcaaacaatgggatattccaatcctttagatttgtgaatggtacaaatttgcaccagatttttatcactttccaaacgcatttgctgactttccgcttgtgcatctggtcgagaaatttgctgggctaaccaacgaataagggcgtgctcgctatcaagctgtaatgatgtttcttgtagcaactcgccaatatgcatgatatcggttaaacgtcgttctcctgcttggcttgcgagtaagttctcagcgatttggttttctatcatgactttacgtagcataggtaacacaccacgtttttgccacaagacaaaataatcagagaattgctccacatagcggttccaacgctgttcatcttgattaagttcgtcaatttgttgtgcgttaaatccaaacagtgcactggcaagagacgctcttaacacccgttctttttcaggggttaccactgcttgtagtaaccaaagtagatctttggcttcattggtttcaaacacactttctctattggataaaaatactgattggatagataacagatctaatgcatctctgatcaataatgcttctcggcgactacgcactagcaccacaatatcggcagatgtgacagctcttttattatcttgttcgattaaccaagcttgttgattgtcaccagctgataaccagtcacgaatttgcatcgcacattgcgaggccattaattgttcataattaccagttgaaaggctttcaccttcagctaaccaaaaatttaatggggcaaccgttttttgctggtaaataaacttcatatgctgatttttttcagccgaattgacctcaataaaaggaatatgatcaaacaaaaaaggggttttagaacgtaaaaacagtttattaactgcacttaccatacccggagccgagcgccagttagtattcaatgtatagtggtgatcggtttgttgccgtgcccgaatataggtaaagatatctgcaccacgaaatgcgtaaatggcttgtttgggatcaccaataaatagcaaaccactctctgtatgctcaccatagatagtatcaaaaatacgatactgctgaggatcggtatcctgaaattcgtcaatcatcgcaacaggataacgttggcgaatagcatctgctaatgcttcgccaccttctcgttgcaatgccttatcgagacgcgttaacagatcatcaaatcccaactcaccacgacgcattttttcattttctatcccttggcgtatttcaggaatggcattagcaatgatcacatcacgtaacgttaaactttgttggcaaagtagttcgatttccgcaaataaagcgtgctcaggcgcagcaccctttgtagttttttcatgtagggttgcttgcgaaaaacgacttaaacagtcaggtaactgataacttttagtttcgagtggagtggcccatgcggtgatttcatcgatccatttaggtaagaaacgactactgtaactgcgtttatcaacaccagatgaagttatccaatctgcaatttcattgcaatgatgacgccatagtgttttaactttatcaatagcctcaatgactgcttgatgacgctgttcaacagtctcttttttagcgtcgaaatcaataccttgaatttcggggcattcaccttgtaaatagggttgaatttcatacagcagttgctcagggccagaccaaatttcgcttaccgcataggcaacatcataagaaaggggataacagtgcctgcgccaaaaatcagcgcaaacacgtttttttaactcatactcatcttggatcaacacctgttcaaacaatacaccagattcaaaggcgttagtggctaacatgcgctgacaaaaaccatgaatagtataaatggcggcttcatccatttgacgctcagcttctaatagccattgcgccgccaccattttattcgggatttgatctaataatatttggtaagcgttattgtcattttctacttgatgacggatacaggctagccttaactgatgaatattttgacgaatacgggcgcgtaattcatccgttgccgcttcggtaaaagtaacgactaagatctcttcaacacttaaggggcgatgaaatgctgactcgccccctaatccaagcagtaatcgtaaatacaataaccctatagtgtacgttttccctgttcccgcagacgcctcaatgaggcgtctttgatacaaaggaagtgtatagggatctaatacctgtgcctgtatcacttcactcactctttaatttcctcaacaggtaatgttttttgtaattcactcacggttgaatagattttccactgtttattttgcgcataatcagcgttgttaccctctttcccgattatttgtgaaacaaacacgagtcctgtcggtttaattatcgctttttcataaaattcgattgcttgttttagcgttaccttattcagttgggctaaaaacttctcacgaccatcatattttaagttattacgatagaaatcattacgataaagagaaacctcttcataaaatgtttgcggtggttgttttacttcatcaataatggcttttttatattgattaaattcagcttcacttagctttttcaagcgatcataagcttgttgataaaatgcatgatagcgctcattgagataaacaggtggtttagcattactttgcagtaaaaagcctaaaccggactgctcacccattgaagcttggaaagcaaagaccgcataacctaattgctcttctgttctgagttgttcaaagaaccaaggatgcacgatagaggataatactgatgtaattgcttttccttgtagacgctcatagccaacagggataaacaattcacctagcgcattatcggtgcttttagatttattttggaatgtaacttgatttaatttatcaaaaactaatgtgtcgccaatccaatattctgttcctttattacctaataatgcctgtgccgatttaactatctcacggctctgctctggcgttaaattaccgataattaatgcttgaagcgctgcattttcaatgacatcacgacgattatctttaatatcttgtaacgttatcgactctaacgccttaagtttatcggcttcttcataataagggatcgtatttaagcgacgggcaggtaacattgcagcatcatacgctttaaggttatgcgtcacttccagttgttcacgataccaagatttagcttgatcaagctcttgctgagtagcttcaaacgttatatagctttttagtgtggcattcactagctctggtaaatgttgagtataaccattgactgagaaatcgactccacgcccagaagaagaggagatattcatgccggcaacagaagcttgataagccagttcactagaggttagatcagcaaggtaattggtcaatgtttgtataacttgctgtttaactgtgcgatctgcatttttattcactaaacttaacgtcacactggctttcggctcatcagaaaaatagtgcgatggcatatagaataaccgagcatgactgtcttgccataatagttgaggcttagtgatgttactatcagcatcaataagtgacagattatcaggaatataagggtttagtgtcggtaatgacaatgagatgtcgctggctaattcctgccatgaagctaattgcttcgcagtaattttatccacttgataaggtgcatgaacaaaataagcttgcttatttgaaggctcattagggctaatcacccaaatacgcgcattttctggtgtaagcgatcctagacgagaaaggatcgcagaaggttgatagtcatcggcaataaaatctgcattaagaatatttttaatcggataacgcagcatcatatcggagatatcttcaatatagttcatatctctaacaatagagccatagcggaatgagaggtcaagcacattggctatttctttaaaatagcgctcactgacccctttattttggatcagttgaatataagaaaatatcgctgaaataactttatctttctcagcaaggcctttgtctgttaaagaaacataaatggtaaatgaaccttgattgcgatcgatataggattcagatgaagcactaatattctctgctaatccttgctcttgtaaccaagttgctagtgttcccgtgctacgattgctaataaggtagccaatatattcatctgatttactgcgaaaatcggcaagattattatcaataccaaattcgatttgtaaggttttttgtggctgagctgggactaagtggatcattatccctttttctttttctgtcatcgcaggcaccgtcgttactggtgcttgggtgtttttattaggaatacgggaaaaagtatcagccgctaatttagcgagttcgtccagtgatttattactataaatcaccccattcattaagttaccagaatagtatgtttgatagaatttcactaattcatcttgtaatttactctctggcttatcacttaatgtttctaagtttcctcccataaaacgagagcttggatgagccggattcaaggtttcagctctcacttgccaaaaacgcattccatcgcgggagcgagccatggttaattccgcattaaccgcattacgttcacgatcagcatatttaggatcaagtaatggctccgctaatgcatctgccaagcgatcaactgcttcattaatggcactattttcaacttctaaataaaatgcggtgcggtaagtggttgtgctggcgttatgagagccaccatttttatttaaaaactctgtcagatcccctgattttgggtatttggtcgagcccattaacaccatatgttctaaatagtgggcaagaccttgttggctatctggatcttctaatgcaccgacaggcagagcaacggcggttaatgatttgaccgcttttttatctgaaaccagtaatacggtcatatcattagctaatttaatagcctgataatcacgtggatcactttcacttttttcaatgctatccggcaatacttgccaaagtggatctgttgcgaagctgttgatactgactagcatcaatagcaacataatccaaagttgcgataagtattttctcatctgatatgagctcccttatttttttataaatggaatgattggcttaaatatggctaacgtggtctgttttactgcctcaagaaaaggtgcatcaagctgatgaaatacacgttgaatatagatatcattcatttcaccttctcggttatagctatcggttaaatattgcgttaataccaattctgccttgttttgtatctcttcatcatcaaataaaaacgtctgtgtttttttatcgaagcaagcttgtaaccaagcccaaccactgttggcgaataaggctaaaggtgtattcatacctgtttgataatcttggatcaatctttcaagggttgaatacgctatatccgcagacaccggtgatagacaccattgcgactcttttctaccataaaaacggctttcgccagttccaccacttaagcagtacacgagatgttctatccataattgcagtagatcattagctgttaatgtggcgggtcgccaacggagtaacccatcggcttgtacttcatttaaacgaccaattaatgggatcgtattaaattggtattctattgtgacagaatgggttgctaaacgttcacttctgactttttcggctaaaggttgcaacgtttctatttgttgctcccaataaatttgaccaaacgcactagctggtaattttccagcagctttaatgcgttcataaagtgcttctgttgatgtcccttcgattaaggcttttaataaccattggtttaatagataacgttgtaatgcattaatgacaaaaggctcttcttccggtagctcggtctcttcaataacaaaattcgtttttagactttgctggaaaaaagcacgtacgggatggcgataaaagcgtgatagttcatctaaagagactttctcaatttttttatttaatggcgttgaaaatgcttggtgagcagttcctttcccacttgctgccggtaaccattcagcggcataagagcgatatagggcatccgttttaaagttttctggcgcaaaaggcactcgactatgttgggttaataagtggctgatgatacgctgcgcactgtcatcaacatttaatgatgcatcttcccttaaacggaaattttgcccaatataatcttgtaactctttaatcaataccgaaggattacattcacgatcgtcacgaatagatttaccaatataactgatataaaggtatttttctgctgagcttaatgcttctaaaaacaggtagcgatcatcatcacgacgttttctatcacctcgacgacgtttttctgccattaaatcaaatcctaatggctgaatattacgtgggtagatcccatcattcattcccaataaacagactgctttaaatggaattgaacgcattggcattaaggtgcaaaaattaaggcttccggctaaaaagcgttggctaattttctcatcatcaaaacgcactgtaagttcatcgcggatcagcactaatggaatttcatgttgatagtgcgcctctagaccattttttatcaccttttgccactgttgtgtgataagcgccaataccagctctgtctcttcatcagtgtcaaaaaaagcatcaacaagctgttgaccgatatcaagccactcttctaagttgcgagtttcgcttaatcgtgtgcgccattcacttaaggtatatagaaaatctgctagatgccctgctaactcagcgactaggccacttgattcatcgtaaggcaataccccttgccacggccctgcctcactgtccatcgcataaccaagaagcatccttaataacccaaactcccacgtattttttcctgtcacaggtaataaaaaggaggccacattttcatcatctaatccccaacgtatacctgactcttcaacccagcgccgtagtagcttcaactcattttcaaaaatggcaaaatgtgcagctaaggcgggtacttcaagtaatgcaagcacttgctctgcggtaaaacggctttgaggtaattctaataaagtgataaaagcttgtaagacaggatgtacttggcgagcttttcggtctgaaatggcaaaaggaatataacgctctgcgggcgcattaccaaatacggcttgaatatagggcgtatagctatcaatatccgccaccataacaataatatctcgcggtaataaatcagcatcttgctcgaggagatgcagtaattggtcttgtaatacctcgacttcccgttgtgggctatggctagcatgaaaggtcaaagagcgatcatcattggcgatgatccgttttttttcactactttggtaatcctcaagcgtctgacctatttgtgaaaaatcctctaaatcgagtatatcggcctgaagttgatgtaataaattatctcttggtatatcaacaaaagcatctaacacatcgctatattcaagctcagaaagaaaatagagattatctttacctaactttccccaagacgctaatagtggattgccgacattttgctccccttcttcattaaatagtgtcgatgcattttgttcatctttaaaccaaggtagttcatgaagttgctgataatgtcgaggctttctactatttagacgagcgaggaattttggatcttgaatatctccccagtaatagcggcaaggattagtaaacaataaatagatttcggtatgtctgccgattgcttgcagtgcttgcaaatagacttgtggcaatgctgaaataccacaaataaaaatacgcgatggaaaacagtgcgcaagcgcccctactggcgcatcattcaaagtagaaataaattgttgataaagattagcacgatgccatttaggttgcgcaagatcttctgtatagcgttgcagtgccaaccacagtgttttttgccaatattgattgtcactcaagccatcaattagttgatcattttcccatgccgacaaccaatcaggacgataaaccagatattggtcaaagagatccgccacacgccccgctagttgatgtaatttacgtttgtcttcatcatctttaagataatgtcgcaagggtttaaatgccggatcatcaaggtaattaggcaataatgccattagtttccatgtcatggcatctttagaaaacgcactttctttaggtatacctgataatacccgagtaaacatttcccaaataaaagtagcgggtaatggataacggatattagcagcaatacccaaactttctgctaattggatttgtaaccactgcgacattccgggactttgcactaaaatcacttcttgctcaaaaggcgatgatagtggccgattttgcataaaatgtaccatcagtgatttaagtagtgataattgatttgaatggtaaatatggaacatcagatcctcattttattaatcacatgaccaatggtataagcgtgtcacataacctgaatggtgggttatcgatccctctattttttgacagccttccgcttcaataagtgattgtgtcattattttaaggttatcaacagagttgaatgacatttgcccataaaaagcaaaaagagacgctccggcttgttggatagccactaagcgctgaaaatcaacttttaaggcttggctataccctataatagcgacaaagctaatattaaagaatagcaatactgacaccatattaattagcatactatcttcttttctttcatgattaattaagtatttattatcaaatacagccttctttaactagtggacagtagtctagccaaccattatgttgggcttcaatatgcagtttttccttaccaaccagattaatccattgataatgagatatcttatctccgctatgacttttagcctctccgagtagtaaagcgcttgtctttcctctcaaagagaaacagcttttcatattagactcagcagtaaaagtacgacattgccattggtaaagacgagaaggcgataaatcccatgttaaggtcattccccatgacaacgcagatccagcgaataaaaaggtctgctttgcttgtaactcttgcatcaccattaattgacattgacgataatgataagcaaaacttgtcagtaacgataaacttatcaccataaaacctactgcagccatcagaccgatgacaccctgttgctcctttattgttccctgtgtcgttatcacgaaatattccttaatagtattgatgtttgatagtgtacttttaggttaatattttgttttgcttggaattttaatgataatgatagatagttaaatgcacgtttttttattggagaatagtgtgtatagggagttaagataaattctgtcacctcaatttcttctttttcgaagatctgttgccaacctgttgaatcacaattttgcacaccacgacgttgttcaagctgaccgttttttaatctaaaaccaaagtaatcactctcttgttcttctggactctcccaatggccgttattgttcatatcgtaaacaaacaaaacacaagagccatgagggtgataaggataatgacctattttaagtggtacaggtaaagaagcctttttaacagtgcaatcaccattgcagtaccctgctcgccttaattgcgtctccagtaactgcaaacgctgttttagataaatctctaaacgatattgttgataagaagaagttaactcattgataatataaggataagcacgtccaatacaaactaataaaatactacttatcgtcatcacaaagaggcactccatcaacataaaacccgcaaaatcatgatgttgaatagacaaaggacgctttagcatactgaaaatgcctttattgtctgactgcacgctcgaatacgccctaatgaagagataataattttgacctcttcatcaccatttgacagcacaaaatgcatcggtcgtaatgtttggcgtaagccacaaaatgtaaagcgtgttgctgtagagcgaataagctgattgtttaaccctaattgaatactttctttggttgtgggtgttgttaacgattttgcctctaatttattaataggtgatagccacaatacaatttgcactttgcaattaaagagcagtgagcgttgttgttgataagctaaaaacgccatcacttctcttacactttgaactaactggcgttggcgtaacaactgatgatatgagctcaaggataaagcgctcaatattgctactatagccataacaataagcacctcgaataagctactccctaaatgtttagagtgggaataatgattgcctgtcatccatgcctcctacttgttttccttgtcattgttactgttttatctcaataacaatgcaggcaaaaaccagataggtaaataaaagctcatcaaatttaagagaggttacgcaatacgatatttttttaagttaataacaataaaatgacgattttttgatatcaaaaacccccaataattaaattcaactattgggggtcacttcaaaggttcgggcttagctggagtgctacatttcaaatttttttactggcttcggatctttacttccataaatatctgtttggatagtgactagcagttcatgaagagtaatttgtaaaaattcaagaaaatctgggtgaaggagagttctatctacgacagacacaggtaagaatcgcttcatctctcccttaaacttttcactcgcaaccaatgcaggcaaagactcaattcttgcttgcaaccattcctcaaaatgctcattgagcttataatcggcaacctttttcattaccagttcagcgtctggtttaacccctttctggtgcaaccacaccaaatcccacatatctctataccgaatacgtgaggttgttgctgggaatgaaaccaatttatcagccatgacctccgtgagctcttccactctaataatcaggtcagaatagccactaggaagctgctcatagtttttaacaagcgttcgaagggtgttggtgtatgcaggaatgttggctatttccactttgatcttctgctttggtaggtctttttttcctggattggtagtcactgatatttgccacttatcgacttttacatctgcataatcaggttcttttcttagctcttttggctctttaaccacaacctccaagccatatcgttcaccaacatatttctcaatacacgctttaatctcaagcagttgcgctgaacagaagtcacgaccaccagcaaagtccagatcttcactaaatctgtttgatccatagcaaagcctaagcgatgtaccgccctgaaatgtgatgtgctttaaaagccctgtggcggaaagagcataaagaatgtcataatgtagcaattctttttccacgacaggcctgttcgcgccgtaatccttttcgatgacaatgctgtcaactagctcattaaaattgacaaaatcagacatagtttaattcctcacgttggatgaggtgtgtatttctgccaaccttcattagatccttaatggcagtctcctttgttgcaattcttaatggcccccttccttccaccgtagtattgagtatttcaagaggcttcttggcagtatgggtaacctcaataacgccccaaggcgttacaaactctccagaccggcctgtggacataatcgtaagtctgtcgatggggatctgtgaaattacaccgtactgagatagagcggattccaaactaatgtagttgtagtggcctcgtcgaatattttcggccagacgttctaaagggtaaggccccaatgaaccttgagtatagatatatacaccttttgatgctcggcgtagcacatcatgcgcgatcagccggtcaactgatttttgtaatgttttcggagactcatcaggaaaaagcatttttaaatctttggtgaggaagatatttctaccttgcttactgaatttgttaaaaacattaattgctcttattaactccatatcaacctctactaaatcacccccaacgaggggttattttgtatatttgagtatagtacattaccttgatatacaaataaaccccaataaagggggtgttttgtatatcaaaacccccaataattaaattcaactattgggggttattaagtgttaaaccaaatcagtgagttaaactacaccgtaaacgggtattttatcgcctcgtgacactgataaccttcaacactaaagtcatctgtcgtgacccaagtttctatatcatctaatgtcttaatgtttggattaatatgtagcttaggtaatggcaatggctctctttttagttgaacatcacgcatcagaggtaattggttctcataaatgtgagcattaactatcttatggaatgctttacctggtttatgccctgtgatttgagccaccagcgctaataatacaaagcattgaatttgattaaaattcaaccctaatgggacatcacagctacgttgatatgaggttaaataaagcctgtcaccgagcaatgaaaaagtatgtgtatgcatgcatggacgtaaacaccctaacgctgtttctccgggattataaaaagtgactatctcaccacgatcgtcaataccgttagttaagttatctaccactttacgtaattgatcaaagtgcgagccatcagggcgttgccattggcgtccttgaacaccatagactcggcccatatcatcttcacccttacgatgcggattatttaaccatgcgctattttcattagcattcgcgttccacgtattacagccaatagcacgaaattgtgctgcattatcataaccacgtaagtaccctaatagttccgcaatcgcggctttgtaaaaacttttacgcgttgttatgagtggaaattggttattggcaacatcatattccagatcggcatttatcaccgttaaacaacgggttcctgtccgtttattatcaatccattcaccttcatcgataatgcgttgacacaatgccagatactgcttcatgtagtctctcttttttgttagctaataatagttagtgtgttgttggcgtctgtggagtggctttatcgcgacgatacgcccacaccataaagataatgcctaatattatcattggaatggaaagaatttgccccatgctgataccgctaaataaacctaattgcgcatcaggttggcggaagaattcaacaataatacggaaagcaccataaccaattaagaataaccccgatacactgcccataggacgatttttgcgcacaaagatattcagaataataaataataccacgccttctaggaacatttcatagagttgcgatgggtggcgaggcaatacgccgtattgctgaatgataggtaatagtgtagtgggatcttgcgcgacaagctgtagatcttctgcacgggagcctgggaataaaatcgcccacggggtatctaaggtgactctcccccaaagctctccattaataaagttaccaatacgtcctaaacctaaaccaaatggaattaatggagcaacaaagtctgcgacttgaaaaaagtgacgtttagtgcgacgagcaaaccaaatcatggcgcagatcaccccaattaagccaccgtggaaggacattccgccatcccagactttaaataggtaaagtggattatctaaaaataccggtaagttatagaataaaacatatcctagacgcccaccaataaacacgcccacaaaccctacataaagtaatgtttcgacttcacttttttgccaaccactgttaggttttgccgctctgcggtttgctagccataatgcaaacacaaatccaatcaaatacatcatgccgtaccagtgcaaagatactggcccgatagaaaacataactggatcgatttctggaaatttaaggtagtttatactcattcttccctacttcactttattaatgattttctatctatgggtcgatgtggataaccccttagacaaaaagtttatacgaaggcctatcagatacctccgcgaattaatccacctaatccttgtctttccataaaatcagcagacaatttttttatctctattgccgtttcagctttcaacacctgttgcataaaaggctgtaagatagcaggatctagatggcgcaataagtattttaccctaggtaaactacggccactcatgcttaactgacgaaaacctagccctattagtagcaatgcccccatcggcgtacccgccatttcaccacaaacactgactggtaactgataacgttggcattctaaagcaataatattaagcgaacgcagtaatgcaggatgcaaattatcatagagcagtgctacatgggtattattacgatcgactgcaagtaaatattgcgttaaatcattggtaccaatcgagataaaatctactcgatgtgctaattgcggtaacataaagaccaatgaggggacttcaagcatgatccccacaggtggtagaatgcattcgcatttcatttctcggctaacttcagcacatgctcttagtaacaatgctttcgcttcttcaatttcatcaatacttgtcaccatcggcaacaatattttcaaatttttaaattcaagattagcttttaacatcgctcgtagttggatcagaaatatttctggctgatcgagtaatattctgatcccccgccaccctaaacaagggttctcctcatttatcggcatataaggaagctgtttatctgcacctatatctaaagcacgtagtacgacgggtttattgggaaaaaatgataagatttcacgataacggtttttttgttcatcttcggaaggaaaaccgctttgtaacataaaagggatttctgtgcgataaagaccgacaccatctatgccaacgctaatacgttgttcatatttaatgcttagccctgcatttaattgcacactgatggattcaccattttttaataccgcttgctgttcaagctgctcttcagcaagttgactcaatactctttcttcatcaataatttgccgatattcctgcatgataaagggttctggttcaataaaaatctcaccacgataaccatcaagaatcagcattcggttgtgaagtagctccggttgaatatctgcccccataatggcagggatccccattgctcgaactaaaatcgctgagtgtgaatgagtcgcaccatcacgaactatcacccccgccagttgttgttctggcaactcagccaatagattggcactaagctcatccgccacaagaataaagcgatctggccatgtatttgtcgtgctgagatcatcatctaaatgaaatagtaagcgctgacctaatgcttttaaatctgaagctcgttctcgcatataactatctttaagacttgagaactgtgcagaaaacttctctatcaccacttttactgcccactcagcaacatagccttgttgtataaccccagtcattttttgtcttaattggggatcgttaagtaaatgcgaatagagatcgaaaatagccgcactctctttttgtgaatttgccataaagcgcttactaaaacggcgacactccgatgtcgcatcttctaaggcgaccgttaatcggtttaattcactttttatatccagtgcgctggctttaaaaacatgatctaaggttggctgagacatctcttgccaaccatatgccatcactacccccgtagaaacggatagggctttaatacggctttgacgatattgtccaaataatcctttcgtttgcacttgcgacaatatcgcccctaattgggtggccagtgtcaccataaaagattcttcgctttcattaaataagcgtcgctctttttgctgaaccaccagcaccccaagtaactgacgacgatagacaatgggcacgccgagaaaagcgcgcagatcatcctcttttacttgtggcagataggtaaaattaggatgttcacgaatatcagccagattaatcagctcagaaagacgtcctacttcacccaccaccccctcatcaaatgagaggctgacggcacgccctttcggctttttcaatccttttgtggccattaaatagaaacagcgatgaggaatatcggcaagataaatagaacacacatccgtgtgcatagcttgacacgtttctttcactaatagttcaagtgcttctggcagactcgctgccatagccactttttctacaatttcccgcaaacgtgtcagcatagtgttatctaataccttttacggcgatatccataggaaggacgagacatagacacttgttcttgtaatggcataactactggtgcgaactctttcatcacgcgacgatatacatctcgcttaaaagagacgacttgacgaacaggataccaatagctaacccaacgccaaccatcaaactctggcgttttgctctgctgaacattaatgtccttgtcgttacttgttaactgcaaaaggaaccaacgctgtttttgtccaatacaaacaggttttgtgtcccaacgcaccaaacgcttaggtaacttgtaacgtaaccagttacgcgtggaggcaaggattttaacatccttacgacttaatccaacttcttcgaacaactcacgatacatggcttgttctggtgattctccaggattaattcccccttgaggaaattgccatgaatgttgtccatagcgacgggcccaaagcacttgcccttgccgattacaaattacaatccccacattcgggcggtagccatcatcatcgatcaccagactacctcaataaccaaacttgaaagataactcattgtttcatactacccacaaacggtaaaccactatcaacagactttgcacaacgtgagtatttatctacaatgggaatgtctcaacggggtgctttttttaagctgagaaaaactcgtggaacctgatccagctaatactggcgtagggatttgagtcaggatggcgcaataataactcatttgcctcctcactcctcagatcctacttgactttttactgaggaaaatagcgtgttaataaattctcttcgttcaactctcttattcagtgcactaggtttgttcagtgcttttgccacaaatgcacaacaaaccaaacccacacttaccgtctatacctatgactcttttaccgcggattgggggcctggtccggcaattaaaaaagcatttgaacaacaatgtgattgtgagctaaaactggttgccctttcggatggggtttctctccttaatcgtttacgtatggaagggagtaaaagtaaggcagatattattttagggctagataacaatcttattcatgcggcaaaacagaccggactttttgcaccaagcaatattgatacatcaaaactagcattacctgaaaaatggactgatgacacttttgtgccttatgactacggttatttcgcttttatttacgataaaaatcgtattactcatccccctaaaagcatggatgagctgttaaatagccaacagccgtggaaaatcctttatcaagatccacgtaccagtacccccggcttaggcttaatgttatggatgcaatcactgtatccaaacaataccgctgagcagtggcaaaaattggcgaataaaacactgacagtaaccaaaggctggagtgagtcctatggcttattcttgaaaggagaaggggattttgtgcttagttacacctcatctccgggctaccatattttggctgataaaaaagacaattatgcggcagctatttttgatgaaggacactatttacaggtagaagttgcagccaagctaaaatccagcaaacagccagaattagctcagcaatttatgcaatttatgctaacccccgctttccaagaaaccatcccaaccactaattggatgtatcctgttattgatatgccactacctgaggtctactccgttatgcctaaaccgcaaaagtcattacaatttgatgctgatgtggtagccaaagagcgccaaacatggacacgtaattggcaatctgcggttagccgctaatgggtaaatggcttatcccggggctatgcgcctcgggattattacttaccgtcgcccttctctccttcggtgctttatggtttaacgcgccaagtggtgatttatcgactatttttgctgatagttacctatggcatgtggtgcgctttactttttggcaagcatttttatccgcgctattttccattttaccggcaatttggttagcaaaagcgctctatcgacgccagtttgttggcagaacgctctttttacgcttatgtgcaatgagtttagttctaccggtgttagtggcgctatttggcattttaactgtgtatggtcgcatggggtggctggctcaaatatgccaatggttagggattgattaccattttacgccttatggtttacaaggcattttactcgcacatatttttttcaatatgccactggctaccagaatgttgttacaagccttggaaagtatttctaccgagcaacgccaattagcatcacaattgggaatgaatggctggcaacgttttcgttttctcgagtggccctatttatggcgacaaatcctgcctactgcatcactgatttttatgctctgctttgcaagtttcgcgactgtattagcgctgggaggtgggcctgcggcaacaactgttgaattggcaatttatcaagcattaagttatgactacgatttacatcgtgcagcgctattagcattaattcagctattttgctgcttaggattagtacttgttagccaaaaattaaagggaacactctttgtcggtagtcatcaaaaactaagctggcgtgatcctagcgactcattaatcaataaaataacggatagtttaattatcgtacttgctatgctctttttacttcctccgttattagcggtgataagtgatggcttaaacagtcaattattaggtgttctacaacagccggtactttggcaagcctttacaacatcattaattattgcacttggcgctgggggactttgtgttattttaacgatgatgttgctctggagtagtcgagaattacgcttacgccattttaaaaaggccggacaagcgctggaaatgagtggactcattattctggctatgccgggcattgtattagcgacgggcttttttctattattaaacagcacaaccggattacctgaatctccctatcttttagtgatcctcactaatgcgcttatggctattccatatgctttaaaagtacttgaaaacccaatgaatgatattgcagcccgctataatctattatgtgcttcccttaatttgcgaggtattaatcgtctacgttggatagagctacgcgctttgaaaaagccactatcacaagcactggcttttgcttgtgtcatttccattggtgattttggtattgttgccttatttggaaatgaaacttttagaacattacctttttacctctatcagcaaatcggtgcttatcacacacaagatggcgctgtcaccgcgatgctccttttgctgttatgtttcacgctttttagccttatcgaacgcgtttcaggaaaatcctatgattaagttagagcagctttcttatacctatgagcaccaacatctgacctttaatttaacggtaaaagcgggggagcgtattgctattttaggtcccagtggtgcaggtaaaagctcattactcagcttaatagcgggttttctgccctcagagtcaggctcgttatttttaaaagggaaagatcataccaaaacagcccctgcccaacgccctatctcgatgttatttcaagataacaatctttttcctcatctcacggtaagacaaaatattggtttagggctagatccagggctaaagctcactgtggcacagaaagcactattagaaagtcgagccaaacaggtttctttaagtgattatctagagcgtttaccttcacagctatcaggaggtcaacgtcaacgagtggcaattgcccgttgtctggtacgtgaacagcctattttattgttagacgaacctttttccgcccttgatcccgcattacgtatcgaaatgctgacattattagaacaaatttgtgatgaaaaaaatctcactttactcatggtgtctcacagcttagaagatgctcataaaatcgcaccaagagcgcttgttattgataatggcaccattgtctatgatggaaatacagcgtcattaatcaaaggcgaagtggatcaatcactgctgttagggataccttttaattaatctattgaaatatagcgatatcgaaagaagcttattcccccctacaagcctctttcgaatatttcgaatacttgactatttttcgaatatttcagataatctagttattaaaaagggggaaatactaatgaatacgataagtgagagacttagtgctgaagatattgcattagcaaaattaagtagccaagagctatccgctgttatggatattaatggcaaaacgcagaagctatccattatagataagacgggtaataatcatattgtacaaataccaaatagtgcattacgcctaatgattgaaattcttactcaactagggcaagggaatactgttagtatcacaccaatccatgctgagctaacgacacaggaagcggctgatatactcaatatgtcccgtcctacatttgtaaaattattagatacacgagcgataccctactctagaaaaggaaatcgtaggaaagttgcttatgctgatattgttgcttataaaaatgaattggagcaaaaacgacttgatgcccttgctgaattatcgcaattagatcaagaaatggatatggggtattaatgacaaactatactgttttgcttgatgcctgtgtcatgtatccagcccctcttagaagttatttaatgtatcttgctaatactggtttatttagagcacgttggagtaatcagatccatgatgaatggatcactaatttattagtcaacaatccaacattaacagctgagcgactaatacgaaccagagatttaatgaatgcacatgttcctgattgtttagtagaaggctacgaaccgcttatttgtggtttaaagctacctgatcctaatgatcgtcatgtgctagcagcagcaataaaagggcaggctcaagctataattacatttaacttaaaagattttccgcaaaaataccttaattcttttgatatttcagctatccatcctgatgaatttttgagtgacatgtttgaattaaatcctagtagctgtattaaagcggcgcaacaacatagacaaagcctaaagaatccaccaatgaccgtagagacctttttaggctgtttacaaaagcagaaattaccccagtttatttcccatttacgggcattccagatattattataagtacatcaacccgtgtaatatcccatttcctatcataacaaggctatgattaatattataattaatagttaacgatctctttttcaagcttcaatatctcgcttattaggaaattatgacaattcacacagagcaaggctttattcttacccgccattggagtgataccccacaaggtatcgctgtctcctattggttggcgacagaaaatggaccgcgtaaagtcacggttgcaaagcagtatgctattggttttgttgcccaacaaaatgaaagtatattacgctcagtggttggtcataatcgcgatattgatattcgtcctctggcgttaaaagactttgaaagacaacctgttttgggggtttattgtaaacaataccgccaacttacccagcttgaacagcaattaaaacagtataatattcgcctgtatgaagccgatatccgcccacatgaacgctatatgatggagcgttttatcaccgcgcctgtatggtttcgttatcaaaatagtcatactgtcacgctaaaacctgccagtgattatcgtcctacattacgtaccgtctctttagatattgaaaccagtgagtttggtgagctttattctattggattagccggttgcggtgataacgttgtttttatgcttagtgacaccctcccagaagttcaagaaagccaacaacctgaaggctatcgtctgtgctatgtaagtagtcgattacaactccttgaaaaactaaatgcttggatacaagagtacgatcctgatgcgattattggttggaatcttattcaatttgatttgcgtatcttgcatacccatgctcagcgttacgggatcaatttattattaggacgacaaaataccccattagagtggcgtgaacatggctttaaagcggggcacttttttgcctcagcacaagggcgtttaattattgatggtattgatgctttaaaaatggcgacatggaattttccctcttttagcctagagtcagttgctcaaacactgttaggggaagggaaagcgattgatacaccttatgccagaatggacgaaatcaatcgccgttttaaagaagataagcccgccttagcgtattataactggcaagattgtgtcttggttaatcgtatctttgataccacacacttaatggaattcttattagaaagagccagtgtaacaggactggcagcagatagaagtggtggctctgtcgcagcatttactcacctctatttaccctcaatgcatcgtcttggttatgttgcccccaatcagggtgaaaaacccgaagagcatagccctggtggttttgtcatggactcaacaccgggtctctatgactcagtggtggtactggactataaaagcctatatccctctattattcgcacctttttaatcgatccggtgggaatgattgaaggtatgcatcaccctgatagcacacatgccgttcccggttttcgtcaagcgtggttttcacgagaaaaacactgtttacccaccattgtttcacaaatctggcatgaacgagataatgctaaacgtcataacaacgccccgctctctcaagcattgaaaattattatgaatgctttttatggtgtattaggctcggtaggctgtcgtttttttgatcctcgattggcttcatcaattactttacgtggtcatgaaattatgaaaaagacccgtgaattaattgagtcaaaaggctatcaagtgatttatggtgatactgattctacttttgtttggcttaaagccgctcataacgaagtacaagcagagcagatcggtcgtcaattagcgcaagatgttaatcaatggtggaaaagctatctgactgaaacttaccagcttgatagccaattagagcttgagtacgaaacccattatcgccgattcttgatgcccactattcgaggtatggaaaccggaagtaaaaaacgttatgcaggactaagtcataataaaatggtgtttaaaggattggaaacagtcagaacagactggacaccactggcgcaagcgtttcaaaaagagctttatacacgcatctttaatcagcaaccttatcaacagtttattcgtgattatgttgctgatacgctattaggaaaatatgatgatagactggtttatcgaaaaagattgcgacgaaaattatcagactaccagcaccatatcccccctcacgtcaaagcagctcgattagcggatgactataatcagttacaaaataggccgcaacaatatcagcaaggcggttggattagttatataattactcacttggggccagagccgttagagcatatcacttcgacacctgactatgaacactacattaataagcaattaatgccgatagcagatgctattttgccatttctacaagatgatttttctaccttgttaaatgggcaaatgacgctctctttttaagatgtgttattttgcaggtgacggcttgctttgcatctattaacataacgcccctttggtgataatcaccttttttctcatcttgagaaagatactattttttatcccgtagattggatgacaacaccgcaatactgcattcattaataatgattttataaattatatatttgagagctgagtttatatatatgccttttactcttggtcaacgttggattagcgatacagaaagcgaacttggactaggtactgttgtggcaattgatgcccgtatggtgaccttactttttcctgcatgtggcgaaaatcgtctttattcccgccatgatgccccaataacgcgggtgatgtttaatgtgggggatactgtcaccagtcatgaaggctggaagctcgccatcgacaacgttgtggaagataatggcttacttatttatcacggcgtacgtttagataccgaagagccagcacaactgcgtgaagtattcttagataacaaactcacttttaataagccacaagatcgtctttttgctggtcaaatagaccgtatggatcgttttgctttacgctatcgtgcgcgtaaatttatgagcgaacagtttaagcaagcacaaagtggtctacgtggtattcgcgcaagtcttattcctcatcagctctatattgcgaatgaagtgggtaaacgtcataacccacgtgttttattagcggatgaagttgggctgggtaaaactatcgaagcgggtatgataatccaccagcaaatcatggatggacgcgctgagcgtgttttaattatcgttcctgaaagcttacaacatcagtggttagttgagatgttacgtcgtttcaacctacgtttttcactgtttgatgatagccgttatagcgaatctttattagatagcgataatcctttcgaaacagagcagatgatcatttgctcattagactttgtgcgtaaaaacaaacaacgctttgaacaccttgttgaagcgacttgggatatgttagttgtcgatgaagcccaccatctggtatggagtgaaaaggcaccaagccgagaataccaagttatcgaaacgctggctgaagcgatcccttctgtattgttattaaccgcaacaccggagcaacttggtcaagagagccattttgcccgcttacgtttgctcgatcctaatcgtttccacgattacaacgaatttattaatgaacaacaaaaatatcgccccgtggccgatgcggtaaccattttgctttcagaagatgatttaaataacgaacagcaaaatagcatcagtgagatgatcagcgagcaagatatagagccgttgctaaaagcctctaatacccaaggtgaagagcgtacaaaatctcgccaagcacttattcatatgttgatggatagacacggtacgggtcgtctgttatttcgcaatactcgctccggcgtcaaaggcttccctaaccgactgttgcacgcaataaaaatgccactaccaactcagtatcaaaccgccattaaggtggctgagattatggcagcgaaaaagagcctcgaagtacgagcaaaagagatgctctatcctgaacgtatctaccaagagtttgaaggtgaaaatgccacatggtggaactttgatccacgcgttgaatggctactaggctttttaaccgccaatcgtcatgaaaaagtattagtcatttgtgctcaagccgccacagcattgcaattagaacaagttttacgtgaacgtgaaggtattcgtgctgcagtattccatgaagggatgtctttacttgaacgagatcgtgcagccgcttatttcgcctcagaagaggaaggcgcacaagtgttactatgttctgaaatcggttcagaagggcgtaacttccaatttgctaatcaactagtgatgtttgatctcccctttaatcctgatttattagaacaacgtattggtcgtcttgatcgtatcggtcaaaaccgcgacattgatatcagtgtgccttatcttgaaggaaccgctcaatctgttctattacgttggtatcacgaagggttagatgcatttgaacatacctgcccgacgggtcgtacaatttatgacaacgaatatgatgcgctagtcaattatcttgctcaacctaatgaactaggtgattttgataagtttatcgtttcttgtcgtaagcaacatgatgagatgaaactcaaactagaacaaggtcgtgaccgtctattagaaatgcactctaacggcggtgaagttggcgttgagttagcgaataagattgcagagcaagataacgatcccgatctggttaacttcgccttaaacttatttgatattgtgggcattaaccaagaagatcgtagtgatagcttaattgtattaacgccatcagatcatatgttagttcctgacttccctggattaccgcaagatggttgtacaattacctttgatagagagcacgcactctctcgtgaagatacgcaatttatcagttgggaacatcctattatccgtaatggtttagatttagtcttatctggtgatacaggtagttgtgcggtttctttattgaaaaacaaagcattacctgtaggtacgctattagttgaactgatttatgtcgtagaagcgcaagcccctaaacatcttcatttaactcgcttcttaccggcaactccagtacgcttattacttgatttaaaaggtaataatcttgcatcacaagttgaatttgaaagttttaaccgccaattaaatgcggtaaatcgccacacatccagcaaattggtcaatgcggtacaaaatgaagttcatcatgtactaaaagcatctgaatccttaatggaagcggaagcgaaaacgctaattgaacaagcgaagcaagaagctgacaacgcattaacacatgagttatcacgcttagaggcattacgtgccgttaacccaaatatacgtgatgacgaagttgaagcaattgaaaatgagcgtacgcatattcttaaccacttagatgaagcgacatggcgcttagatgcgatccgtttaattgttgttacccaccaataatcactgttaaaacgggggaaagctttatctcccccgttattttgctgagatatccactatgatggaagtttataacccccccactgatccttggttacacgttttatatcaagatgagcatattattgttgttaataaacccagtggattgctatctgtacccggcaaagcgctagaacatcacgacagcattatgtcgcgtataaaagccgattttcctgatgcggaatctgttcatcgccttgatatggccacgagtggtgtgatggttgttgcgcttaataaagccgccgagcgtgaattaaaacgccaatttcgtgaacgagagccgaaaaaaacctatattgcccgtgtctggggaaagcttgaaaaaccacaaggattagttgatctgccgttgatctgcgattggcctaatcgacctaagcaaaaagtatgttatgaaacaggaaagtctgcacaaactttttatgaagtgttggaatatgaagaaaatgcaacgcgggtaaaactatcaccaataaccggacgctcccatcagctacgggttcatatgctagcattaggtcatcctattttaggggatcgtttttatgcccatccgcaggcaagagcactcgcacctcgcctgcagttacatgctcaggaattatttattacgcatccggcctttcattcaccgatacattttgaatgcctggcagatttttaacctgtcttacgacactaaaacggtcaccgaacttagtgaagcaaggagcagacagagcgctaatcctattaccccaacaagaacacggacgtttgacattgatatagttccttttataagagaatgagagtgaaataattaaatttcacttatattttaccgtgacaaataataatctcaactaagactgagttatcttcatcacggattaattctctcttttctcatctttatttacaagatgttaacgaaatcctttttcttttttaatcaaatcgtaagcaacttggatagcttgtgctttttgttttgcaatttccatcatctccggtggtaaaccttttgcaaccaatttatcaggatgatgttctcccattaattttcgataagctctttttattgttttaacatcatccccctctttaatacctaacactttataggcgtcagaaagcgttgggccttgagtttgtggctgataattttgcccttgttgataatgaaaactttgccccgcctgcatcatggctaatatatgttcaaaacgggcgcgagaaaatccgagctcatcaataataataaacagcattttacgttcgttaggatgtaactgcccatcagcaaatgcggcttgtaattgaatttccagaaacatctgcagtaaatcacggcgaccggcacaaatttggcgaacacgttgtaaggtggctctaagtgggaaatcaacctctttaccttctcgaaacgcctgttgtgctgcttgacgtgctgccccatgtaaattcattctatccattaacgtactggctaatgtgatatcggtttgtgtcactcgtcctttggatttggttaaatgccctaagacttggaatgtggcagcaaagaaataggcttgtctatcacgattatagcgcccaccatagcttaatttacttctttgtacgtcataaaggtgtcctagaaaaaccccaatcacaatgccccaaaagccgatcccggcaaaactaccgatgataaggcctaataattttccccaatagcgcatagactcctcaaatcttcaatgccctgctcacaattttgcattatcatactattcatttgctttcacacctaacatcaagcaagctcaaataaactttttcttaaaatgatgaggttttcgctagctgcttgcacagagataatgctgttttcgtttaaattgtgttaaagtaaaataagtgaccaaacgaataactttagcgttgttatgcagcacgaaataccgcacaagcgcggtgtttttttgtttctaataaagctataaaccgatttcaacatagaaacatcgaaaaaagggaactgctcttttttcggttaccgttagaacaatgttcaggacgttgggctagtgttgcataactccctgcgttagtttctcgctatttagcagtagaagccactgatgacggaagcacataaatactcatgaaaaaaagttatcccacactgctggccaccttagtttgggccacaatttatgctcagcctgcatatgctgatcttgcctctcaatgtttactgggagtccctgtttataataagccattagtcgaaggcgatcctaactcattacctgtcaccattacggctaaggatatgcaaggggaatacccacgcatgatccaatatagaggcaatgtagacattaaacagggaaatcaaacattaagcgcagataatgttgagttgacccaaacagaaggtgaaacaccattaagaatggtcaccgcgacaggtaatgtctcttatgatgatccacaaatcatcttaaaaggcccacgtgcttggtctaatctaaataataaagatactgatatcgaagaaggtaaataccaaatggtgggccgacaaggccgtggctacgcgaataaaatgcaaatgcgtggcgaaaaccgctataccattatggataaagggatgtttacctcttgtctacccggcgacgatagttggagtgttgtcggctctgaggttatcttagatcgtgaagagcaagtagcagaaatttggaatgcacgttttcgtgttgctaacgtcccagttttctatagtccttatctgcaattaccgattggcgataaacgtcgctctggtttcttaattcctaatggtaactattctcgtagttctgggtttgacttccaactgccttactattggaatattgcccctaattatgatgcgactattaccacgaattatattagtcgccgtggtttaaagctcgataatgaatttcgttatttaacaaaaccgggtcgcggtacgattgcggttgattggatccaccacgacagtcaatacaataaagataaagcagacgaaaaagcgggttatctggcgcgtgattctgctacacgctggttattctattggggtcacagtggggtgatgaacaatgtgtggcgctttaatgttgactacacaaaagtcagtgataacaaatatttcaccgactttacttcgcaatatggtaataccactgatggttatgcgacgcaaaaattcagtaccggttatgctcagcaaaattggaatgccacattaaccactaaacagttccaaattttctcagataataaagatgcaagggcttatcgtgctgagccgcagcttgatcttaattattataaaaatgatattggcccatttgattttcgtacttatgcacaatttgtccgctttaccagtgtcggagaaaacacccctgaagcgaaccgttatcatatagagccaaccatttccttacctgcctccactggctgggcaagctttaataatgagtttaaattgatggcgactcattatgatcaagatattcctgatgcttataaaaataacgctaaaaatccaagacttgatgatagcgttaaccgcgtactaccacaatttaagtcagatatgaaagtggtatttgaacgccaatatgacactaacgatattacgcaaacgttagagccacgagtacaatatctatatgtaccgtataaagatcagtctaatatcaataactttgactcagcgctattacaatccaactatagcggacttttccgtgacagaatgtacggtggtctagatcgcattgcttctgcaaaccaattaacggcgggtgttacttcacgtttttatgacagtgaactggttgaacgttttaatatttctgttggtcaaatctatttctttgagcgtccgaaaacaggttcatcgaatgaaattatcaatagcaaagatgaaaccggatctatggtatgggcaggcgatgcatattggcgcattactgatactttaggtatgcgtggtggtttacaatatgaccgtcgtttaggcagtgtctctatgggtgatgcgattatggagtatcgccgtgatagcgaccatctcttacaattgagctatcgttatgtagaccgtgattatattcaagcaacacgggttcgcccttatgatggcggggtcaatcaactaccagaataccaaaaaggcatttctcaaattggtgttgtcggcagttggcctttagcagaacgttggggactggtcggcgcttattactttgataccaaagattcagagccagtaagccaaatggttggcttacaatataacacctgttgctgggcggtaaacgttggttatgaacgtaaaattgttggctggaaagaagaccacagcgatattgacaacaaatggtcaatcaatttggaactcagaggcctaagtaacaatcatagtttaggtagtcaaaaaatgcttgagcgcggtatcttaccttatcaaagagcgttttgattaacccaaacgacaaaattggctgaatgaatatgtcatcgcgcaaaatgcggaaaacacataatgggaaacttatgaaaaattggaaaacgctggttatcggcttaatgatcacggttggtgcagccaccagcacaaccacttttgcagcacaagaactcaaccgcgtatcggctatcgtcaataacggtgtcgttctggaaagcgacgtcaatagaatgttacaaacggtgcaaatgaatgccaaaaatgccgggcaagaaatgcctgatgagcaagttttgcgccaacaaatcttagagcgcttggtgatggataacatcatcttgcaaatggctcaacagatgcaaattgatattcctgaagctgccgttgagtcaaccattcaagggattgccgcagaaaacaacctgacactagagcagttaaaaaaacgtcttgctgccgatgggattgcctataacgattatcgtcaagatattcgtaaagaaatgatgttagcagaagtgcgtaataacgaagttcgtcgtcgtattacgattttgccacaagaagtggactcattagctaaacaaattgaaagccaagcaagccaaagtattgatcttaatcttagccatatcttaattccattatcagaaaatccatcacctgcagaaattgaaaaagcacagcaagtggtgaaccgtattaagaaccagctaaaaaacggtgctgatttcggaaaattagctgccacttattctgccgatccacaagcacttaatggtggtaatatgggatgggcatcaattgatgagttaccgacaatctttgctaaacagcttgctaatgcacaaaaaggtgaaattgtcgggccactgcaatcaggtgttggtctacacattattaaagtcaatgatatacgtggtgcttcaaaaaccgtttctgtgactgaagtaaaagcacgccatatcttactaaaaagctcgcctatcatgaatgatgagcaagcttatgccaaactacagaaaatttccgccgatattcgtagcggtaaaatcagttttgcggatgcggctaaagagtattctgaagatcccggttcagcattacgtggcggtgagttaggatggtcaatgcctgatatttatgatccagctttccgtgacgcgttgatgcgtttaaacaaaaatgaattaagccaacctgtgcgctctaattttggctggcacttaattgaacttgaagatacgcgtagcgttgataaaacagatgcagcgaataaagaacaagcttaccgcttactgtttaaccgcaagtttaatgaagaagtgcaaaactggatgcaagagttgcgtgcaggcgcttatgtgaaaataatgaacgagaataatgcaaactaagctaaaaaaacccctcgttatcacccccggcgaacccgccggggttggtcctgacctgattatttcattagcacagtcacagtgggcacttccttgggtagtatgcgctgatcctcaattattacgagcaagagcacagcaactcaatctcccactcactttagttgaatattccccagataatccacctacagcacatatccctggccaaatttgtgtacttgccgttgaattaaccgacccttcggttgtcgcaggtacacttaatactgccaatggccactatgtggtacaaacgcttgctcgcgcttgtgatggatgtttaaacggagagttttctgctttagtcacagggccggtacataaaggggttattaatgatgccggtgtgccatttacagggcatacagagttctttgccgatcgtagccattgtcaacgagtggtgatgatgctggcaacggacactttaagagtcgctctcgccaccacacacctgcccttaagagaagttgctgatgcgattacgggtgagttgcttaatgagatcatcaccattttaaaccatgatctaaaaaccaaatttggcatctcatcaccacatatttacgtatgcggtctaaatcctcatgctggagaaggcggtcatatggggcgtgaggagatcgatattattgaacccgcattagagcaattacgccaacaaggtattcaacttcatgggccttaccctgcggataccttattccagcctaaatatttaacacatgcagatgctgtgcttgcgatgtatcacgatcaaggattacctgtgctaaaatatgaaggtttcggtcgtgctgtgaatatcacgctcggtctaccttttattcgtacatctgttgatcatgggaccgcccttgaacttgcaggtactaaaagcgcagatgctggcagttttcgcaccgcattaaatttagccattaatatgatacaaaattgtaatgaataatagagtccatcaggggcactttgcccgcaaacgcttcgggcagaactttttaacagacagctatattattgaaagtattgttgaatctatttatccacaacccggtgaagccgttattgaaatcggtcctggtttaggcgcgcttactgagccggtgggggaaagaatggataaaatgacggtcgtcgaaattgaccgtgatttagctgcacgcttagaagttcaccctacattaaaagataagctaaccattattcagcaagatgcgatgacgattgattttgcccaattagcaaaagagcgtcagcaacctctgcgggtttttggtaacctaccttataatatttcaacgccattaatgttccatctatttagttttgctgatgccatttctgacatgacttttatgttgcaaaaagaggtggttaatcgcctagtggcaagtcatggtagtaaaacttatggccgcttaagtgtcatggcacaataccactgccaagtcattcctattattgaagtgccaccaagctcatttaagccagccccgaaagtagattctgccgttgtgcgtctgatcccttataaggaaaaaccctatccggtgacagatattgctatgttaagccgtatcacatcacaagcctttaatcagcgccgtaaaacgttacgtaatagcttaggtggactacttacagcagaagatatgctggcattagatattgatcccactgcacgcgcagaaaatatttctgttgagcaatactgtaaagtggcaaactggttatcatcacaacagcaacacgctgagtgaaatagcgcacactagacctaggaggtattatgtttacttcatccaaagtggcgatacaggtacaaagcgtttacattgagagccaatcttcgccagaagaacagcgctatgtttttgcttataccatcaccatacataacttgaataaacatgctattcgcctcctacgtcgctattggttgatcaccaatgcacaaggaaataccactgaagttcaaggtgaaggggttgttggtgaacaacctctgattgaagctggctcacggtatcgttataccagtggcgcagttcttgaaacgccgatgggcaccatggaaggtcattatgaaatgattgacgcacaaggacgtctgtttcaaattgacatccctgttttccgccttgctatccctacattgataaattaattatggctacttatttaattggcgatgttcacggctgttatcgtgaattacgccaacttctcaatcaagttaatttcgacgccaatcaagatacactttggttaacgggggatctggttgctcgaggacctgattcacttgaagtattgcgttttgtcaaaagcttaggctcagcgttaaaactcgtattagggaatcacgatctgcatctactgggggtatttgcaaagattagtcgtaataaacccaaagataagcttaatgaattactcaatgcaccagatgctgatgaattaattaattggttacgacgtcaaccgctattacaagttgatgaagaaaagaaaatcgttatggcacacgcaggtattacccctcagtgggatttagcaacagctaaaaaatgtgcccgagaagtagaagccatattaagtagcgatagttacccccttttcattaattccatgtatggtgatatgcccaataattggtcacccgaattaactggcttaccgcgattacgctttagcaccaatgcttttactcgtatgcgctattgttttcctaacgggcagttggatatgatttgtaaagataagcctgaaaatgcgcctgcgccattaaaaccttggtttgatttacctaatcaactaccaaatgattacagtattatctttggccactgggcctctttagagggaaaaggcacccctgaaaatatctatgcgctagatactgggtgttgctggggcggtgttctaacctgtctacgttgggaagacaaacgttattttatccaacctagtctcacacacttaccataattttgtagcgttaagatagcataggtgttgatttattttactatgctatctgggctatctactctcttctgagagccatcacaaagataacttgatttaaatcaataggttattttttctcaaaacaaattaagtagcttttttataacaacaagcagaattaaccgctatattgcgctatttattatagattattctttataaagatatttattaaaagataaataatgaatatttaattatagggtactctttatagctaattatattttagttatagtatctattcatatttaaatatgaatatattaataaattaataaaaataaaaaggagatatttaatctccttttttatttaaattttgttattttcttctttttaatatttcaaaacagtagttatgcgaattattttcatctgcctcatggtattccataaaagtagaatcccactcatcaggctcataatcggggaaagttgtatcaccaatcacttcagcatcaatatgagtaaggtataatttattcgccattggtaggaattgctcataaaccttaccgccaccaatcaccatgatttcatcattattttcagcagcttgtagtgcttcttcaacggatttcacccaaacaacattgtcatcatttccaggctgactgcttaatacaatattgagacgattaggtaaaggacgcccgatagactcataagtcacccggcccataataacgggtttatttaatgtattttttttaaaccatgcgagatcaccaggtaatgtccaaggcatcgccttttccataccaataatacgatccgccgctaatgctgcgattaaactaatattcatttacatacctacgggtaaaaatgggaaaactatttatactatacggaaagcgaaaacttgagtcgatacaatttatgcttcaccgataataaataattgctttatacaggaagtgttaacttaatcatgaaagctttaaacattataatagtgctatatggcagttgctattatatttgaaaattctttaggtgtttttacaattactttacgctcattacaggcgcgagaaccttacttttttctcatcgtaaaaaatgtagcactttatcaataacatgcgaaaagaggcactgctacttctcattgactggcttatagcacttttaacattaaagtatcacctttcgttaaggcaatcatacgattgttgacatcctccacgccctaaaggacgtggatccctactgcgttcagactgatgtctgaatcaactcggcgggttcctgcttcgacgggcggtctgactgcaccctccctccacaggcaagcacggcatgtcctgccgctaaaatgttacgtgccccgttgatatcagcattcgctgtatatccacattcaaggcactcgaattgactttgtgactggcggttttcctttgctgtatgaccacagtaagcgcacttctgactggtgtaggcagggggtattgccagtacctgaccacctcgccagagctgcttgtactcaagctgacggcgcatttcataccagccctgctccagtattgagcggtttaaaccagatttagcttttacgttccgtccaggccgttctgtcgtaccttttgccgatttagacatgttactgacctttaagtcctcaatgacaatcattgcgtggtttttgctgatttcactggtgactttgtgaaggtagtctttcctaatattggcaatatgagaatgcagacgttgaattttgcgcttttgtttttgccagttggcactgaatttgattttacggcttaatttccgttgaagccttgccagctttcgctggtttactttaaaactgctgacgggcgggtataccgtaccgtctgaaagcgtggcaagttttgtaacgcctgcatcaagcccgactattgaggttgattcatgttgtggttctgtcgcttcatgctcagtctgaatgctgacgtaccatttaccgcatgactgactgaccgtgacgtttctcacttctccgacgacttcacgactgttgcggtagcgcatccatcccaactttggcaatgatatacgactattggattgatcgagcttcacgccctgcgggtagcgaaaagcgtcatttttaccgcgtttcttgaatcgaggaaaagcggtacgcttctggaaaaaattcttgtaagcccgttccaaatctttcagtgactgttgtaacggttgtgatggggcttccttcaaccattgtgtctctgtgtcagatttccactcaatgagccatgaagccatttttgtatagggaatgtatttattccctgcttcgtaattctcattctgacgtgctaatgcccgattgaaaacaaaacgacaagcccctgcaaagcgtctcatctcacgctcttgctgaccattgggtcttaactggaatttaaaggcttgtagacgtttcatattgcctattatactttggtctatgaaaaatgaaactaatattttccttggcagacattgtgtgttcctgatgcacatccatttggtctttgtcacaaaatacaggcgaaaaatatttgatcaggatgcaattgaaaaatggcgaggctactttgccagtgtttgtgctgattttgatgttgaactggttgaaatggatggggaacgggatcacgttcatttactgattaattacccgccaaaactggcgatatctaatctggttaacagccttaaaggggtatcgagtcgattacttcgacgtgatcgtcctgatattgcccaacgtgattactacaagggggttctttggtcgcgagttatttcgcggggagttgtggttgcgcaccaatatccattatccgccagtacattgagcaacaggaaacaccgagttagttaaaaaaccgcgccttatatccccgacctgaaggacggggttttacggtgctttggataaaaagaactaaaataggtgtaaataattatcaatgtaataggtgtaatcgattattaatgaatcaaaattccaatccttatcgtcccttaagtaatcaataatatccagtaaaatatctttatatttatctttaagatcatcacactcattgtctattttttctaaaatattctcatgattatttctaataacattagcaatggtatatttcatttcatcactattttcattcttagtaaaaatattttgcattcttctattatgtttagtgataaaactctcgtcttccattgtcatttttttagctttaataatatcttttttttctaacactcctaatgtaagcatatcatctacaaacttttgaacgtcttcattatttcttaatttattagtcaaaaaatttgatattgactttttaaaagcatcgttaatatagtttaccgtattatattccattgctttatcaataaaacatttagttatattgacaataaacgctttatccatctccaccgaataaatactatacattatagtaactaaattcattattgaattaattaattcattattatcttttctattaatctctttacaaacataacttaatgccatatcaatatgttgtttatagttaaaatcactataatataccatatcatcgcactttgggtgatatttcttcaattgttcaaacatttcttttggataatgattaattatattgaaagcaatgtttattatagtaataaagtctccttttgtttttgatttttcataaagataacattgtattaatcttttaacatcatcatgacaatcattttttattgcataacttaaagttaaaaaaaatgtatctaaatgtttattcttaaagctaacaaaatctgagttaattagcttacagtttttaaaatatacttcccctccatttctcatcaaaatggataatgtattaattttcgcatgttgacttttgtctaatagaaaaaccaccccaacattaatattaaaaatactctttataaaaaatgatattttagatagtaaagtaatcttttccctttcaatataaagacttgaaagcgtatttaacacatcattgattttattttttatttggtatttctcttttatattttcatcgtatttttttattgaagtaacgctatcaaaattattttttatatgcataaaaactccttatctcatagtaaaactatcttttatttatctacatattcatacaaaaaaaagcccttattactaagggctataaatatcaaaaaacaaataaggtttagaaattaattttcaatattgcattaataccactcgaattgatatcactattatattgaccttgataagagataccgaaagtggttgatttacttaactgcgcatcaacacctagaccaacaccaaataaattatctagtttaccacctcgtagtgatgcctcacctgaattggataaccatagacgtgattcagggcgattatcaccaaacagatggcttgctgatatatcaccttttaatgccatattaatattgcctgccataaatggatatccaccacgtaaaccaaccgtagcaacttgaatatcttgtgcatctgttttagtggtaaacttcatattacccacattttcattgatattatcagtggatactcttaaccaactaaatccagcataaggttcaattgagtactggctagtattcaattgagtataagcaccttctaaaaagaattgactaattttcgcatcgtaactggttgagttataacctgcagtttgtcctatccagagtgttcttttggcatctctatcttggtttgtatgtgtaaatccataatttaatgaggcaacatcataaagattagagatcccataagcaccaatatgaatatcattactatctatctttccatattgattacctttatatttggtggagcctgcaccgaaaaatagacccgctttagtattttcagtaacatcaatttcagcacctaataacccaacatagaaatcaacatccatatcactgtggccataatccgtcttaccccactgacccatgccgctgatccaaatacgcgcattactattacctagttgtgcatggcgaccatcaccgataccaatagcctgatctttcactgtacgagttaaacccaatacattaacaatactggcattattggcatttaaatacatatcactacccaatgattgataagtggttttcagatcattttcattcatcggtaatacagcattaaatagctcaccattccctgtattatctaatgcattagcaatagcacgaccattttcattatcagcaaaggtggctaaagtcgtattttctttcttagttaaactaccactgatggttttatctgttatcgtgatatgtttatcaaataaagcataatcattattggtgacagtagtggttgtggctggatctgcaaccacacggttactggctaacattttcgttttagtgcgattatcaactaaactatctgtattcacctcaccgacaacaacactattattaagataaatatcttttagttgcccaacattatccgcccccacatcaatatcggctccttgattaagcactaagttaccaatattaacattgtgtcctgcggtcactaaataacgacctttatcattaatattaatgtttactttatggttttggtttgaggttaattggcctttttgagtaaaagtatcgttataacgctcaataatacctaatttcccaccattaacattgacggcttgcgtcccaaaagatccgctaaagccatataaagtaccttgttcgacagttgtaccaccacggtaactattatttcccgtcatgactaacgtaccttcgcctcgcttcaccaaagcaccatcatataagccagcatcaattttagcttgaatagcatcagcgcgtttttggtaatattcttgacgccatttttcagcatcttcttggctaacaatatgcgatgtaggatcaggattgccatcattaatcacaaaatcagtaccgagatgataatcacctcctgccgcaatacctttttcggtatattctttcaaccatgcgagatcttcttgcttacgtagatctaaagctgtttgggaaatatcattagtccacacatcaagcggtgtcgcatttaggttatattcaaatttacctagcaattgacccggaccatacatccctttatctaaatctggtgttccccacccataacgtacatcgggagtaccttctgcagccgtccagctctcatataaagagccatcaggatcacgatggttagcggtagtgaacatgacatcacgaacttgaatggcgttcatggaaggataacgagacattaatactcccatcgcccccgtcacatgaggagctgccattgaagtaccactaaaggtatcccaacctggatttccctctttatcaaccactgtagaatagatatttcgacctggtgcaaccactgtccaccattttgcattacccgcttcattgaagactttttctaatacataaccggtgttatccgcattttgcttcaatcctgccaccgcaatccaatgctgttcggcttcgggattaaaataaggataaagaggacgataataaggttgagcaaagtcgcgattacccgttgtaaagacctgaacaacattcgttcctttaactgcatcataagcagcatcaacaaaggaaggtttatcaccatagacttttttaaagtagaaatattcgtattctgtctgtgccgtggtgttaacaggcatatgtatcgtggtattaccaccatcaggcccctctgttttatctgtattaataatgcgcgggttagtcccccagctattattaatcacttgcgcacccgcgtcgaccatcgctttccagccagtatagaaataggtatagtcttgataagggccatagttattgctgtctgttgccccagtattccctaaataaatatcagccccccacgccacaccatgcataccattaccatcacggttagcccccacagtaccagtgacatgtgtgccatgggtatcattcacccctttgatccaattaccatcaacatcaaagacttggcctttttcataatgtccgcccatttcttgtggatagcgcattcccgtagagccatattcacctttggcttttactgcatgaaaacgagatccactcaactcttgatgtgagagcagtgcaccagagtccatcaccccgactttagcaccttgaccatgaaaacccagagcataagcactagaggcattcatggctgcaagcccccagtctttttgatattcagggctttcccaactttgtttattacctaattgtccaacttctgaatatgcaacagcatagccagaaaaaagaagtgccgaagtaataagggagagttgaaatagagagtttgtggtattttttttctgattaatgggatggtgacttaaagctatttctttgttcattctgtaccttctgttatgttgaaagggataacattaattaaggaataaaaacaaaagacgtagcgatcctctcttttttataacaataattacttgagggatctctcaaatatacgaagctaaaccacaaaaatagatagattgcctaacaaatcacaacttaatagtttaattaaacaattttaaaacataatctaatattatataaataaatagatttaacgttttctacggtaatactgacagctttcaatagctaaataaagctgataaaaagcaaaccaataaaaaaacataatagctaaattaattaacaatttattttataatctgatttagctatttaattctagtatgaaaaatttatttttcttaattttatagtaataaaaaaaacagtatctttattttaaaaatactgtttttattttaatttttgacgtgatattacttaatttttattctgatggcgtgatttccatttgccccgcaatccctttatccgcattttcgagtatttggctataataaacaaaagggaaatgggaataagaaggctgttttagctcaactaataattcactctgtttttcgatccacactgtatctttccaaccaaaatcagcaggcgctggtttttgtccatcatgattaatcactttaaaacgtgcaccttcaatatgaaaaggttgtggtgtttccactgtcactaaccaacgttcccagccattttgtttaccgacaagatcgatccttgataactcccaacgcgcattattaataccaggaggactgttttgtaattggatcgttctcggttgaattgaggtggtaatttgtgtgtcatccaccaccaactgttgtggaactttatcggtaaccagtgacatcagtccagtaggcttgatggttagcacattggtattgcgcaataagttagaaggttcaaaaataccacgtaatctatccataaatccggcactttgcccagcagtgatagtcacttcttcgccttctgatagatcaataagaatttcacgtcgctcacccggtgccataggaatagatttcaattctaccggtgacgttaacaaaccttgatcagaggctatcagatagagtgagcgaccatcattcgccgataactcataacgtcgagcattcgaggcattaactaagcgtaaacgaatccaacctcttgatacttcaatataaggatcttcacagccattcactaataatgtgtcaccataaaatccctctgtcgcggcttctttgtcgtactgtggcgttccaaagttatcaaggcgtttatcttgaagaataataggaaagtcatttaccccataatgtttaggcaatggtaacgatttgctctcttcgtcttcaacaatccacatgcctaccaatccgttatagacatgaggcgccattttaaaaggcgtattcgcatgataccagcaggtggccgctttttgacgaataggcaacaccggtgaccaataggctcccggagacatcatccttgcagctccacctatttgtgttcccggaactaataagccacttacggtcatagaaacgggttcattaaggcgattgctataaatcagtttgacatcatcaccgctttttactttgattgtcggacccggcattgagccattaatgccccagacttctgttttttgtgtgccatcaaaggcccaatgcactttttgtaacgttacaaaaagaggctgaccattacgtgattcaagtaatgggggaataggtagttttctatcactaactgatcctgcacgaacagatgaagataatgagcccagacataccgctaagcctgaagcctgtaaaaactggcgacgactaaatgacatactttctccgcaacaaaatacccatattcctatcccacgagtgaggatcaactgataggaaaaaagctgctgtgatatttaaagacaaaagacttaaatcaaattatgacagcataataacgcggatatgacataaatcctaaaaatagttgataacttagtgcattttaatttattaaagacaatatccgtccgaaaatcgggatatattcaaacgatcaatcaacctataacgtttattgttagccattataaagtatataattaaaccattaaaatcatgatgttataaaaatgccaaatctaatcgatttggcattaggtatgataaacaattaaataaattacagaccgttaatttaacttacctgcaaaatcgcgtttattcatttcttccacttctttatcaagctcttcaattttagccttcatgatctgacgacaatcttcagctaattctctcacctgatctttgttatattttgatacatcaatgggaggcaacatttcaacaatcacgtagccattattccagcgatttaattttatcttaccttgtgtggtagagacacaaacaggcacaataggcacccccgcttgcatcgccgcgtgaaaagcccctgttttaaaaggtaataaaccacgtcctcggctacgtgttccttcaggaaacatccatacagagatttttttcgctttgatttgctctgcaacctgagtgatggtgctatgggctttagagcgattacctctatcaatcaaaatattgccagtgatccaataaagctgtccaaagaaaggaataaacaccaagctttttttgcccaccgtcacggtattaggttgtaccgcattcgacattgtcaccatatcaaagttattttgatggttaccaatatagatactgggtccataacttttagcttctttaggaaaacgctcaactaatttgatcccaaagacatgtgataatttgccgaataaacgtccataagtcattacgtgtttcggatttctgggagaaaacatgcaatagatcatcccaaaagtcaccacaataatggtgtacagaatgacaataatgcctcgaataatggctagcataagcttttagcgtcctaataataagtgggtcatatgacccactaatctacattgaaagttaaaattaatgagtttcgatatctatatgatcgatactttgtgcaccacgagggagcgaggttccacgacgaccacgtttggctttaaatgtctgtaattcattcatcgacatcgtgagtttacgtttaccaaaatgcaatgtaacactggcattttctggtaatacccgcaaccaagcgactttatcttcaccacttgcagcctgtgaagcaggaatagaaaccatttggttaccttttccttttaccatagttggcaactcagaggcttcaaaaatcagcattcgcccaccctgagtaatgatcatgatcaaatcactcaattcatcatttaagcgttgaggtggtaatggtaatgcattttcaggtaatgttaataatgatttaccagctctatttttagaggttaagtcatcaatactacagataaacccataaccagcgtcggatgccattaagatcttatcgctactttcccccatcactacatgacgtaattgagcccctttttggacttttaatcgtccagttaaatcatcacctttactacggcctgatggtaatgcgtcaacatcaacagtataactttgacccgtggtatcaatcagatgtaccgcttgattgctcattccttcaactgcgtcaaaataatcatcccctgttttaaagcccactgatttcgcatcaatgttatggcctttttggcaacggataagccctttttcggacatgatcacggtaaccgcttcagggtgaagatgttttaatgggataggctcatcgccaacatcaccactaaaatagctaatctcttctgcttttaatgtttgttgttgaccatcaacagtaaatgtgagggcttcattttttgctattaacacgatttgttcgataacatcactttgctctttgcctaatgcaactaagcgagtgcctcgacctttcttattcatctcatttagatgttctgcagatatcgccagaatacgtgttttatcggtgataataactaaccaatgttgattgtttttcttttctgcatcgactaagaaaggcgctagcaattctgtttcatctgaaaccgttaacagccctttaccggttttattttttgtctccatctcttcataactgagtacagagccataaccctcttttgttgccagtaaatactcctgtttagcggctcccgctaacatatattttacgctggcgtcaggtgggaaggtcaatttaccggttaaaggctcaccttggctacggcctgatggcatgtcattgggacttaaactatagcttctacccgttgaatcaaggaacaatactggctggttgctcataccccgtaccgcactatgataactgtctccggcacgataactcatggtactaggatcaatttcgtgccctttcgcactacgcacccatcccatttcagaaagcacaatagtcacaggctctgatggcaacatatcttgttcattaaccactttcgcctcttcttgaggtcgaataggagaacgtcgttcatcaccaaactctttagcgtctgcctctatctcttttttcaataacgtattgagacggcgaggagaatttaacagtttttcaatactgtcgcgctctttttccagttcatcactttcagcttgcagttttatctcttcaagcttagctaagtgacgtaaacgtaactctaaaatcgcttctgcttgaatatctgataatgcaaaacgacgcattaattccgcttttggctcatcttcataacggatgatctcaatcacttcatcaatattgagataagcgattaataaaccttttagaatttctaaacggcgtaatactttttctaagcgatggtttaaacgattggttacggtttgacggcgataaactaaccactcatttaaaatggttaatagccctttcacagcaggacggttatctaacccaatcatattgaggttaacgcgataacttttctctaagtctgtatttacaaataagtaatacatgacttgttctaaatcgacgcgattactacgaggaacaatcaccaatcgagtaggattttcatgatctgactcatcacgtaaatcatcaactaaaggcaattttttcgctcgcattaatgcagcaatttgttcaagtaccttagcaccagagacttgatgagggagagctgttatcaccgcacaaccctcttctttttgccaaacagcacgcattctaatagaaccacgtcctgttttataaatctttttgatatcctcaggagcggtgatcacttccgcttctgttggataatcaggtccttgtacatattgcataacatcagataacccagcatcaggattatctaatagcatggttaatgcttggccgatttcccgcgcattatgtggcggaatatccgttgccataccgacagcaatccccgttgtcccatttaataaaatattaggtaaacgagcaggcaacatttttggctcttgcagggtgccatcaaaattggggatccaatcaacagtaccatgtcccaattcgcttagcaggatctgtgaatatttagataagcgagactcggtataacgcatagctgcgaaagattttggatcatccggagccccccagttaccttgcccatcaattaatggataacgataagagaagggttgcgccatcaataccatggcttcataacaggcgctatcaccgtggggatgatatttacctaatacatcccccactgttcgtgctgattttttaaatttagcactgctgtttaaacctaattcagacatcgcatagacgatacgacgctgtactggctttaacccatcgccaataaaaggcaatgcacgatccataatcacgtacattgaataattgagataggcattttccgtaaataagtggagcggttggcgctctacaccatcatgagtcagttcactcattcaatattttcctcagacgcttggtgagttccattacacttcgatgtcaacttcgtcgcctttttcttgcaaccagttacggcgatcttcagaacgttttttggcaagtaacatatccatcatgcccaacgtttcttgataattttcatcatcaatcaccaattgcactaaacgacgtgtattaggatcaagcgttgtctcacgtaattgcagtggattcatctcacctaagcctttaaagcgttgcacatttggcttaccttttttacggctaaggcgttgcaaaatagcgttcttttctgcttcatcaagggcataactcacttctttacctaaatcgatacgataaagaggtggcatagccatatagacatgaccttgctttactaatgccgggaaatgacgaacaaataaagcacaaagcaaagtggcgatatgtaaaccatcggagtccgcatccgcaaggatacaaatttttccgtaacgtaattggcttaaatcatcactatcaggatccatcccgatcgccacagaaatatcatgcacttcttgtgacgctaatacttcatcagaagagacttcccaagtattaagaattttaccacgtagaggcataatcgcttgatattcacgatcgcgagcttgtttagcagagccacccgctgagtccccttcaactaagaagagttcggtataacgtaaatcttgcgaagtacaatctgctaatttacccggcaatgcaggccccgaagtcagtttttttctcaccacttttttagccgcacgcatacgtcgttgcgcactgctaatagccatttctgcgagtaattcaccgacttgaacgttttggtttaaccataaactaaatgcattttttactgcactagcaacaaaggcactggtttgacgtgacgatagacgctctttggtttgtcctgcaaattgaggatcttgcatttttactgataacacataagcacaacgctcccatgtatcatctgcggttaatttaatgcctcttggcaataaattatggaattcacaaaactcgcgcatggcatctaatacaccttggcgcaaaccattaacgtgtgtaccaccttgtacggttggaatgaggttcacataactttctgtgagtaaatcaccgccttccggcaaccaaagcattgaccattcaacggcttcgttatcaccttcaaatttccctgtaaatggctcttcaggcaggcgaacaaattcagcgacagcttcacttaaatagtcagttaaaccatcagcgtaacaccacgtttcttgggtattattgactttatcggtaaaagagacattgacgcctgggcacaacaccgctttggcttttaatacatgagataagctttttgatgagaaacgaggaatatcaaagtaagtgctatccggccagaaatgaacactggttcctgtatctcgtttagcacacgtacctatttgatgtagctcttcaactttatcaccgttctcaaaagcaatttgatatattttgccttctcggcgcacggtgacttcaatacgctttgataacgcattaaccactgagatcccgacaccatgcaagccaccagagtattggtagtttttattggagaattttcctccggcatgaagatgggcaaggatcagctcaatagcagagactttcagttctggatggatatcaaccggcattcctcgcccattgtcgataacctcaatagattggtctgcatataagataacttcgaccttggttgcatgccccgcaagcgcctcgtccacgctattatctatcacttcctgtgccaaatggttcggtctagtggtatcggtatacataccaggacgccgacgtacaggctctagaccattaagaacctcaatatcctttgcattataacttgattgagtcattgttttaatctgcggttcactgtttgagaatactgtttataataacaggtgttagcggtaatatgatattcatttttgaattgagacatcaaccccagtattgcaggttaatgagtcgaaaacgatgttattttcaaaaactgaacaatttccgggaaaaaacgttcaaaattaacaaaagcatggtttcctccctgctctactgtttgcttacaagcgccaagatatgaaaccgcttgacgataatcaagtatttcatctccagtttgttgaagcaaccaaataagatcgggggaagttatcgtaggaatacgtaaggcaagtaactcatccatatggtgaggtgctaatctatacttttgatgagtataaggattttcattatcgcctaaaaaatcctgtagcaaatcaaacgggcgaaccgcaggattcaccaccactgcaggtaaatgaaaacgttgtgataaccaaatagcaagatagccccccagcgacgagccaattaatcctaacttatcattggcattatcttttactaatttttcaattaattgagcggcttgctgaggataagggggtaattggggtacaagtagctcaatatcaggatgagtgactgataaccattgtttaaacccttgcgccttggctgattgaggcgagctattaaaaccatgtaaatagaggatacgagacatgacttaatagccatccgcgtcaagatctggacaaaaatctttacccgctagacgatgtacttgagtatcaatattcctcttaccctgtgcagataatgataactccaaatagcgccaacctggcgaaacggtatctaaagaaaaattagtacaatgcgggcgaaactgaatacaggtagagggtgttgctaataagcgaataccattccacatttcatccatttcttgatgaatatgaccacatagcatcatttttatttgagggtgatctttaacacgctcagctaactggtgagagtttcttaaactatgttgatctaaccaagtacagccagaaggcatcggatgatgatgcaataagatcacagtatctctttctttgtggctttctagacagcgtgttagccaatctaactgacagtcagataactcgccatggggaacaccttgaatttggctatctaataataacaattgccaatgttcaccaattaacacttgttttgccgacagaatgcctgcctgatttaaagcatcaatcattgctggttgataatcatgattaccgggtaaccacacacaaggtgaaggtaatcttgcaatcccatcagcaaaatgctgataagctgcaaaggattgatcttgaactaaatccccagtagcaacaatcaaatcaatcgataacccttgctgtttaatcgcgtccaataccgcatgatagctacgataggtattaattcccaacaaggtatcatccacattagcaaaaaggtgggtatctgtgatttgtaatattctaacggtgtgttgttgatccaccgacaattcaagctggctttccaaaaggtttccttgtttctctcttactagccgttattttaacgtaattttgtattaaagatctgccacccaatacacatttcaaaagattattgagaaatattctcgctaccagtcacattttttatctcttatgttcaagcttaatcgattgtatattcatatactttaaagataattacgtcatttatcatatcttttcatagtgacgaataaagtttcttttggcaattatcacaaccaatcttttcttaaggtgacatgatgaagctgtaaccactgaagtgcgatgacggaagcggcattatcaattatcccttcttcaacccattgataagcctgctctcggctgacgacatgaacacgaatatcttcattttcacaagctagcccatgtatgcctgttgctgttgtggcatccacttcccctacatagacatacatccgctcactggttcctccggggcttgaaaggtaacttacaatgggcttacaacgacctattgtgatccccgcttcttctgtggcttcccgtcttaccacctcttcagggctttctccttcttccaccatgccggcaatcacttctaataaccaaggtgtttgactggtttcataagctggaatacgaatttgttcgattaatacaacttcgtctcgtttaggatcataagccaataaaacacccgcatgaccacgttcgaacacttctcgcttaacttcggcactccatcctcccttaaataaacggtgtttgaaacgatactcgttcatacggaaaaagcctttatagagtgtttttttacttatcagctcaacatcattacgtgtatataaaaatggtgtattttcctttttgttcatacaatattcctctggttatacttaagtctttttttattgcatacgtttaatacagatttaaagatatttgcccgcaaatcctgtaaagttaacctaaaataaaaggatatggcacaaatggctacccctacttagggaaacaatctgctagaattgtttctatacaagattaacagaggcaactcagcgaaactgttgcaacaaggaattaaaatgaaaaaactgctctctcttttagtcacgatgagtttggcagggttcagcactgcaagtcaggctgaggatctgctacaagtttatcaaaaagcaaaggacagtaacccagaattacgtaagtcattagctgaacgcaatcaagcttttgagaaaatcaatgaggcacgtagcccattattaccacaattaggattaggcgcttctattgattataaaagtggctatcgtgatgctaaaaataccgagtctaactctcttggtgcgaatttaacgctgactcagactatttttgatatgtctttatggcgtcaattgaccatgcaagaaaaaacggcgggtatgagtgatgttacctatcaaacaagccaacaacagcttattttagataccgcaacagcttattttaatgttctgcgtgccattgactccttatcatttattgaagcacaaaaagagcaggtttatcgccaattagatcaaactacacagcgttttaatgtagggcttgttgcgattactgacgtacaaaatgcgcgtgcaaactacgacagcgtgttggcacaagaagtggctggacgtaatgaactggataacgcattagaaaaactgcgccaagtcagcggtgtgtattatattaatctggcttcacttaatatcgcacgtttttccaccactccaccagacgccattgataaactgttaaaagacgcagaagagcgtaacttaagtctactcagtgctcgtttaggtcaagatttagcacgtgaaaatattcgtttagcgcaatcaggccatttgccaaccgtaaatttaaatgcttcaacgggtgtctcaaacagtcataatcatggtagtgctttaccaccagaaacacctgctaacagccgtaatagctataatggtcaaagcagcatcggactctctttaagcattccattatatacaggtggcagaacgagctcacaagtagaacaagctcaatatggctttaccagtgccagtgagcagttagaatcggtataccgctctatcgtacaaattgcacgttcttcttataacaatatttcagcctccatcagtagcattaaggcctatcaacaagtggttgtgtcagcgcaaagctctttagatgcaactgaagctggctatcaagtgggtactcgtactattgttgatgtcttaaatgcgaccacaacgctttatgatgctaaacaaaaattatcaagtgcacgttacgactatttgattaaccaattaaatattcaatatgcacgtggtaccttaaacgaaaatgacttaattcagttaaataatgcgttgggtgaagagatttctacttcccctgacaacattattcgtccattaacaagtcccgtactgaatacgacaaattaatcgttaatagacaccgttaaccatcaaaaccgcttacagtgatatacgggtaagcggtttttttatacactagcgagaaaaaacatttttggttacaaatagattaaaaataaattcacctaatgcccattacttaagtttataaataacccaatcattatttgtttaataaatagaggatttagctgatttcattgccattatccctatgaagatcacaaatttctgctaatcgctgatgattaggtgtttcttatttattttctaacctatttaacctatcctagcttttattttgaacgttttactttttatggatcttaccaatatgacaatgaaacgtaccaaatcgattaatcgcgatgcttttcgtaaagcatttcgcccttatcgtctggcgcctgttgccatcgccatcaccgcggtattcgccctttcagggtgtgaagagagtgatgagacggtttcactgtatatgaatgcacaagaatgtgcgcaagcgaatccatcacaagcagcacaatgtgaagattcttaccgcacggcattacaagaagcgcaacgtactgcacctaaatacgcaacaatggaagattgtgttgctgaatttggtgatgcgcaatgtacacaaactgcctcaattgatggtaaccccgttaacaccgaaaacgccaataacctcaaccctgatagttcacaaatggcacaagctaactctggtggtagcttctttatgccactgatggcaggttatatgatggggcgtttaatgggtggtggcgcaccagcacagcctttatttagctcgcgtaatccaagcagcccagctaatggtaagtttgttgatgcaacgggtcgtaactatggtcctgctgtcggtggtcgtcaaatgaacgtccctaaaacagctatgactccaaaaccatctacaacatcaaccattacgcgtggtggctttggtaataccgtttcacgacaagcggcagctcaacgtgcaagcgcgacgaataacaaccgtagctcaacaggctcctcttcatatcgtgcaggtggttaattaaaccatgaaacgcgaacaaattattgaacgtcctgattggcgcgaaaaagccactgaatatggttttaacttccataccatgtatggcgagccttactggtgtgaagatgcttattatcaattctcaatggaagaagtggaaacattagaagaaaccacggaagagcttcatcagatgtgcttacaagtcgctgataaagtggctaatagtgaagagctattgactcgttttcaaattcctcgccattgctgggattttgtccgtgagtcatggaaaacctcgcaaccatcgctttattcacgtcttgatttagcttatgacggtaaggggccggcaaaattactcgaaaataatgccgacacaccaacttcattgtatgagtctgcttttttccagtggatctggcttgaagatcaaatcaatgcgggtcgtttgccacaaaatgccgatcaatttaatagtatccaagaaaaattgatcgacagattcgctcaattgcgtgatcaatatggtatgcgttatctgcacatgtcatgttgccaagatacgcaagaagatcgcggtaccgtacaatatttacaagattgtgcagaagaagccgaagtcactaccgatttcgtttttattgaagatattggtttaggtgaacggggtgagctgaccgatctacaagaccagatcatcagcaatatgtttaaactctatccttgggagtttatgttccgtgaagatttctcgaccaaacttgctgatgcagggatccgttggttagagccagcttggaaaagtattatttccaacaaatcgttactgccaatgctgtgggaaatgttccctaatcatcctaatttattaccggcttatttttatgacggtaaagcgccagattcattatcacgctatgtcatcaaaccgctcttttcacgagaaggggcgaatattcgtatcgttgaaaatggtaaagatatcgctgttgctgatggcccttacggtgaagaaggctttattgttcaggacttccatccactgccaaaatttggtgatagctatacattaattggtagctggctagttaacgaccaatctgcaggtatttgtattagagaagataaagagcttatcacgcaagatctgtctcgtttctatccacatattatcttagattaataacgcaattgctgtgatagcaaaacttattgtctagcattgaccccctccccgccctgagctaaagggcggggctttatggcacacctaaaaaataaatttaggcttaacattctatcaattagttttattgaatattttacccaatttgaaaggtcatcatgctaagtgatttattaataatatcattatttaataaagttactttttcatccggctgttttaaaccgagtagatataatgcaggtaaaaaatgttctgctgttgggtgtgcgagttgcccttcttgcgttgataaaatggtaaaaagcgcttcaggcactttatcactttgtaaacagcgctctactgtttcactaaaagataatgcccaagagtaaggctctgcttggtcattttgccaatccatcattcttaaattatgaacgatatttccactgccaatcactaatacaccttctctacgtagttcaaccagtttttttccaaactcatagtgccactgtggcgattggttagcatcaatacttaactgaacaacaggaatattagcattagggtacatcttctctaatattccccaactaccgtgatcgaatccccattgctccatatccagttttaatttcatcggatcaatcagatcttcaattaatgcaacgagaccaatggagccttttgcaggatattctatttggtataactctggtggaaatccataaaaatcatgaattgttttaggatgagtcatcgctgtaatataagtcccttgcgtataccaatgcgctgagatgactaatattgctttaggcttaggcagtgtctctcctaacgtcgtccagaggcgagtatatttattatcttccaatacattcattggactgccatgtccaacaaatagcgctggcatcaattttctgtccataatcacctcttatcatcttgctatctatggcatttagcatactgccttcttacttgaaatatagtcaaagaagtgtgaaatagttattcaaaaaatatgaaaaagccacttagggaaacttaagtggcttgaataagtgtgtgtgtgttttcagtgtcgttttaacttgttaatttcagcccgctttcttctcctcgcgaagacgataagccactaaatcttcaatcgttaacactggcatatcatgctgtttagcaaaagtgacaacttctggcgctctggccatggtgccatcgtcattggttaattcacataacacggcaacaggtttaaaacccgctaacgttgctaaatcaatagaagcttcagtatgtccaccacgtgttaatacaccaccaggttgtgctcgtaatgggaatacgtgacctggacgatttaaatcacttggttttgcattatcagcagcagctgcacgtactgtcgttaaacggtctgctgctgaaactcccgtagtcaccccttgggccgcttcaatagttaccgtaaatgcggtatgaaaatgactggtgttattttctaccatcataggtaaatcgagttgttgacggcgctcttcggtaatacagacacacacaataccactgccatgacgaatagacatcgccatttgttctgtggtcatggtttctgcgacaaataccatatcgccttcattttcacggttctcatcatcaagcaccatcacacctttaccggcacgaagggcttcaagcgcacgctcaacacgctctaatggagagccaaattcggaaagtagcgtctgattcatggtaaaaaaacctcaataattaatgaaagttaccagaaccagggcagtcttaggagtggatctctgctgtataaatagacaagcagaaacaacaggaatggatacaaggatcccactgatgctattttattctctcccatccagactttaactgtcggctccagaattacactggatctgctgacctttgcatcacattggtaatacaaagcgctcgcgggctttacctgattattcaggtatctaccgccggtggggactttcaccccgccctgagataaacagagaaactatacgctttaaaataataagaggcaatcccaatccacaataacccttgtcaaatcacactaatctgttattgataggcaaataatttaacgatttatcataaaaatataacaataatatcgatatcaggttttattcccacagccctcatattacacttagcatagctttctattttattgtgaggactatccatgctggacccaaaaaaaattgaacaagtcgctcgccaaatccaaaatgtactaccacaaggtatcaaagatttaggtgatgatattgataagaaaatccgtgcaatacttcaatctcaattaaacaaattagatttggttaatcgcgaagaatttgatgtgcaaacacaagtgctgttacgtactcgcgaaaaattggctcgtttagagcaacgtttaaatgagttggaagcaggacaacaagcgccagcggaagttgcacagattgaagaagttgatgttattgttgaaactgggaatgacagtaaagcttagttgatagtgtaataacaccctgtgccacattcggacagggtgttttctcaaaaataactttcatttgttaataaattctcttagttcggctattgtttgttctattttatcttcaaaatcaatatcgaggatattaaaaaaagcttcgtaaccaatatctttaattactgttttacagtaatatttacttttacaattatcaaccccgattgaaggtaaattaaatctattattttcttcagtatattttctaaaaaactcatcttctatatctaaaaatggactatataagatattatctccagatactttacctcgagagtcaccatctaaaaaagaaatcatatgtttactttcacaaataaagttttcccgcttatttcttctcataaaatctataacatttgaagcaccacctatataaataatctttactgatttatttgtatcaattttagaaattaatctttttaaataaatttccaacattatatcttctgttagaatatatttatcataatctttaaaaccaaaaagctcacccacaatataactatatgagacttctctcataattagcctggaattaatattctctaaataaaatatagactcaccaacctgttgatataacactctcataataggaagagaatgtgttgtaaatattatttttttcttatatttatcacacaaattattgagggcttgtattaatctaacttgagcagaggcatcaagagaaatatcaatttcatctacaacaattaatttacaatcagaagttactgtcttatatagatttattacaaagtactctccagagctaaaataatcctctctaatatatctatatccatcaagaggaagaaaataatacttattacctcttattattacctctttgagtgatgagaatctctctcctatatagatttggctcaaaaaataaattatttctatatttttattaaactctcccttaatataactctctcttaattctttatcaatattacctaaaacaggaaaattagagaaacgttttccataaggaatagggagttcaacatttaaaaaactttcatcaataatatcttttgaatcaatttctccgttattacaataataatgataattgtttttatttatagatattgttatattagtttctttatttatactgaaaattgaagatgtcttatttaagacacttatatcttttaataagcataatgattttactatagatgttttccctattccattccggccagttatacaaattaaattcctattggaaaaatcgaaatctaataaaacattattaatgtgttgtaatgatttaatgtttagtgatataaacatcacaaatcacctttatttttaattaatttattaattattgaattaccatatttacgtcttagcttatttatataaactggatcaacacctaatgcataagataattttccagctaaagaaaatattgcactcatttcatccatttctgaaaacttgacaaatttatctttattattaataagaaaaaatattttaacttctatctctttttttaactgacgacttatcgaaagagttcctacaggagaaatgcttatacctaatatattcctttcaaatttttttgttattatttttgtttttttatcatttaaatgaaatacattatcctgattataattcaatatattattaatctcttggttaattgaattcttatctaagttatttttacctgataaaataatatcatccgcatatcttgtatatattaaatcgttatttttagcaaaacaatctattttacaatcaatatcatacataacaaaattacttatagctggtgatgacgaaaaacctataggtagttttttatctatagtaactaactctaatattctagataaatgaaccattacatcatttgtatctaaaaaagaaatatcttttactttttctattattttattttttattaagtcatagcctatagatggaaaaaaattttcaatatctgttttatatatataattattaaacctatgaggagaaatacaatctactacattaactccttttcgataagagtaaactaaatcttttctaaactctatattttcaaaaataaatttagataaaaatagttgaattgtttttaattcatcactgattgaataacattttttattattaaaattaaattctttaatatgatcatttaaagataatgtataaaattgttcgaaactctcttttccattaaaataaaaattaaagacttcctctaatttcatattctttccccctatatattagaaagggtgaagaatctctcttcaccctttctaatatatttatactgcctttagggactccctttatgactggagataactcgctagtcaggagtatggttatattatagccatttccaacataaacggcaagtacatccaacaaaagcactcattagagtgccctttcaattataataaacagcttaattatttctttttaatggcattaataatattagttgtggaaataccatcttcaaaattaagtactttcacttcaccacccgcagcccacacctctttactgccagcaatgtcttcgggtttataatcgccaccttttactaaaatatcaggcaatactgatgcaattaaacgctgtggggtatcttcttcaaacgcgacaacccaatcaaccgcccctaacgcgcctaatacggtcattcgttgctctaatgggtttactgggcgactctcaccttttaagcgtttagttgatgcatcactatttaccgcaacaatcaggcgatcacccaatttacgtgcattagctaaataactaacatgtccagcatgaagaatatcaaaacaaccatttgtcatcactatgcgctcaccacgttgacgcgctaaagcaaccgcttgtttgagttgtgactcttccataataccaaagccgttatcagcacgcccgcgaatagcattttcaagctcaataggagaaaccgttgacgttcccagtttccccacaaccacaccagccgcagcgttggcaagaaagcacgcttccgctaatggtttgcctgcagctaacgcagtggcaagcacaccgataaccgtatctcccgcccctgtcacatcataaacttcttgtgcttgagtgggtaaatgcaatggcgcttcattggcttgtaataaactcatgccccgctctgaacgagtgatcaatagtgcatcaagtgctaaatcttttactagttgagtgcccttttctactagctcatcatctgtatgacaaacgcccaccacttgctcaaactctgacatattcggtgttaatagtgtggcaccacggtagcgttcaaaatcactgcctttaggatcgattagtaccggcacacctgcttttttagctaattggatcatttgctgtacgtgagaaagtgcacctttagcataatccgataaaattaaggcacccattgagggtaatgcttgttgaatacgctcataaattggctctggagagacattgctaaatccctcttcaaaatcaaggcggataagttgttggttacgtgataggacacgtaatttagtaatagttggatgtgtcgcaatagagacgaaatcacaacgcacattaacctgacttaatgtattgcttaatgcttttgccgcttcatcgatgccggttaaccccaccaaacgagaattagcccctaaagaagcaatattcattgcaacgttagctgcaccacccggacgctcttctatggtatctacttttaccacaggcacaggtgcttctggtgagatccgacttgtaggaccataccaataacggtctaacatgacgtcaccgacaaccagcacattggctttattaaaatccggcagcgttactttcatcccatactccacattattttcaaaaataagccgaaataataccataacttgttacgcaaaaagcgaaactcatcagaatagtgtgaacaaaaaagagcgtttattcatctaaccatttttgtttactactcaatacccattgccgttctgtaataaaacaatctccatcaacaaccgcaggtaatgtttgtaatgcaagatgatgaagctcattacgtagggtgacataagcttgagttaataactgagcctcttgttcactcatcacttggtattttgccattaattccaaaattcgcacattatcagaccaacgggtcaaagccggatattgatgtgaaaagcgcaataccaaatattgtgcgataaactcaatatcagtgatcccccctgatgaggcttttaaatcaaatgtattgctttgagtgggtgccaaatgctgtaccattttttggcgcatctcacgcacttcctgctgcaatacagttgcgttacgtgctaaacataatgtttcatggcgagtacgtgcaaacatctgctgtaattggtcatcgccataaatcattcttgcacgaattaatgcttgatgctcccaagtccaagcttcatttttctgatactcatcaaaggcttgaatagtacttaccaacatacctgattcaccggaaggacgtaagcgtgcatctacttcatataacacgccggaagaggttctggtgctaaatagatgaataatacgctgcgctaaacgtaaatagaattggcgagcatcaatctgttttgcccccgttgtcagaatattcattgggcaatctaataaaaaaaccaaatctaaatcagaactataccctaattcccagccccctaatttgccatacccaacgaccgcaaaacctaaaccgtctcgttgcgctaaatgcgcaggttccccatagcgtttcaccatataggaccatgcttggtgaacaacggcatggataatggcttccgctaaataggttaggtgatcgctgactttcatcaccggtaatactcctgcaatatcctctgcggcaatacgcaatagctgggcttgtttaaattggcgtaatgcttctaaacgttgctcttcatcttcttctggcacacgcaataaatattgacgtaattcgtcctgataggcatttaatggtaatggttgatagagggaatgaggatcgagtaattcatccaataataatggatgtcgtgttaattgttcagcaatcatcggtgatgcagcacataagcgcactacgtgggttaatacttcatcagactcttgcattaactctagataagtggttcgacttacaatgcccaatagcaacggggtgatacgctgtaagatcaccaacgcttgtggttgaaggcacactttagccaataacttaggcattagcgcatcaagcacatcacgccctctaggccctatagtacgtttactgatatcttggcgaaacagttgcagtgtttgacaaatagcttgcctatcttctgccgttagcccttgatgaaaaagcgttgcgctatcaggtaaacgccctaataaccataatcgcttaaattcgctgacatcttcttcatcttcattttcatcatcttcgccaatcagttgcgtaaaaataacggaaacagcctgcattttttggttaatttgttgatagagcatttgccaatcgtcaaatcccatcgcaaacgccagtcgtgccttatcttcaagattgtcaggtaacgtttgtgtttgttgatccgcaatagattgaagaagattttctaatcgacgtaagaaaagatagctatctgctaactgtgatgtttcttgtgcagagagtaattccaatttagcaatgacattaagcaccgttaatagtgaatgactttgtagctcaggctctctaccgcctcgaattaattgaaaaacctgagtaataaattcaatttcacgtatcccccccgccccaagctttatattatcaatcatccctcgacgacgtacttcacgacttatcatcgatttcatattacgaagagattggatcacactaaaatcgatatagcgacgataaacgaaagggcgcaacatttggcgtaagatttggcaatactcttttttttctgcccccaaaacacgcgcttttaccattgcatagcgctcccaatcacgtccttgctcttgataataatcttcaagcgcggcaaagctcatcactaaagggccactttcgccaaaaggacgtaaacgcatatctacacgataaacaaaaccatccattgtatgttgatctaacactttaatcagtttttgccctaatcgggtaaaaaactgagcattatctaattcacgtcgcccaccttgagtcacaccattttcaggataggcaaaaataagatcgatatcagaagagaaattcagttcaagtccacctaacttgcccattcccaaaataagtaatggctgaggttttccctctctatcacaaggcgttccccactgttggcaacattgctgatatagcttatctttggcgacactaatcaaggtttccgcgagtacactcaattgcttgagcgtacagggtgtatcacagagttggaaaaattgtgaccaggcaatacgcactaattgttgatgacggaactgtcgtaaaatggccatcaagtcatcttcattatcaacatgagtgagttgttgctttaattgagatgagtaattttgccactcatcactaacaggtggtgtttgtctgatttccgttaaccagtgaggattgacacgtaaatgctcggttgcaaaagggctaaaggcaaaaaattgctgctctcgctcactaaaaggggcaagctcgttgagctttgtagaaaacgtgcattgtgctttatcccataattgttgaaacacactgttagcagacataataaactctcaattgtcagaaaattaagcgatagccagcaaccacgccattgcagataatttaaaattcagccataacacatgataataatccgttgcgcgggtaaaggataacaacgaaagattatcgagtgcttgctgcattgattcaggtaactgaggctgctttttacaccaatcagaaaacagtgctaacatagcgggcatagtgagtgttggtggcgtcggattagcaaaaatagcttcttctaacgcttgaatagccgctaaccacttagtcagttgttccgctattgtgtcattaggtgcaagattgaccacacttaacgataatgcgggcttatctttagcaagataataaccacgggcagctttactgcgtgaagcaagtcgtaatcccccttgttcacctaaaaaagtcgccaaagcaatcacatccgccacttggcctttttttagctccagttcaaactcttcaataggtaattcatattgcgctgtacgaatagtgcctttatctagcaccacttcaatttgactctctaaataatccaccagccaaatttcacgatgaaaatcggtatgaaaaagaacctttaattgtgcttgtaatgccgttaaatcggtcttatccggccaaatttctgcgggaaaacgggttaaatcgagggttggctcatttaatgtcacattatattctgggcgttgatgtaaccccgcaactactttacccgctgttttaattgtcatttcataatgagagtcaatgccacggatacgtagccccatgtcccaattacgcatctgattatcggaggtttcaaagtaaagattagtcaatttatgcggtggtgtatgctggtatggcaaagtcagaatgcgctgaataatctgaggaatagcggcaggtatcgcactaagtttgagttcggtttctaattggctcattctatttcccttaagtaaatcaatcgattagtaaaatatttaacgcattgttatttcgcaaatggtagtctattcacaataatgaataaaaggcagattacccctatattctatcagttaagactgttctcattctggtttactatttgcttacgcaaactttactctttagtatcagtaaaaatattctcttgtatagataaaaaagttgaaaacataatgcgaaaattacctttactttttctttccttacttggcttaggcgtttctctgagctcacacgcagaaactcgttatgtttccgatgaattatccacctatgttcacagtggccctggtaatcaataccgtattgttggctcattaagttcaggggcaacagttacggtactttctcgtaatgccgctacaggttatgtgcaaatcaaagacgataaagatcggacagtttggttaccagaaaatcaattaagtacacaaccgagtatgcgcactcgcattccggctatggaaaaagagatccaaaccctacgcgataaattagcgaatatcgaccaaagctggaaccagcgcacaattgacatgcaaaataaagtgtcaaacagcgatgaaattatcaatggtttgaaaaaagaaaatgagcagatgagaacaaaattagcggttgctgagaaaaaactcgattttgctaatcaacaattagatgataggcagcgtgatatcatcctacagtggtttatgtatggtggtggtgttgccggtgctggtcttattttgggtttaatattgccacatattattcctcgtcgccgtaagcgtaatgaccgttggatgaattaatcacaggcaattaaggatcaagatcccgtgaaaatctaccttgttggtggtgctgtgcgcgaccaactattaaatttaccggtaaaagacagagattgggtagtggttggcgcaacgccagagacactattacaacaaggctaccaacaagtgggtaaagattttccggtttttcttcaccctgatactcacgaggagtacgctttagcgcgtaccgaacgaaaatcaggctcaggttacacgggatttacctgctatgcagcccctgatgtgaccttagaagatgatttgcaacggcgtgatttaaccattaacgccattgcttactctgctaaaggtgaatatatcgatccctatcatggtattgatgatattcatgccaaattactgcgccatgtttctgatgcatttagtgaagatccattaagggtactacgtgtcgctcgttttgcggctcgttttgcccctttaggttttacaatagcgccggagacgatgtcattgatgcaagagatgacaaacagcggtgaattaaatgccctcacggctgaacgagtgtggaaagaaacggaaaaagcacttcacagccaagccccacaagtctattttgagatcttacatcaatgtggcgctctaaaaatacttttccctgaaattaatgcgctctttggcgttcctgcccctaaaaagtggcatcctgagattgatacgggtatccataccatgatggtattagctatggtcagccggttgactgacgatatcgcggtacgttttagcgcgctttgtcatgatcttggtaaaggtgttaccccggtagaaaattggcctcaccatcacggacatggccctacgggtgttcctttagttgaggctctgtgccaacgttatcgtattcctaaccagatacgtgatctcgccaaactggcagccaaatatcacgatcatctccaccgcatagaaagaatgcgcccctcaaaaataattcgacttttcgatgcgattgatgcttggcgcaaaccagaacgcatcgatcaactcgctataattagcgaggccgatgcaaggggacgccaaggatcagaaaatttgccttatccccaaggagtattttttcgtcaagcctttaagattgccaatcaagttgatgttaaatcaattgtcagtcgtggtttaaaaggcagtgccatacgagaagcattaactaaacaaagagaagtcgcgataatagaatggaaatcgcgactttaactattgtgtgtggcaaatattaagcgtaacgctcaataatcaccccgacgttggcggcttgtgctatcgcccctggtttagctaattttattttgactcgtggtacagaaaactgagttatcagtagctgtgccacttcttcagcaacacgctcgactaattcaaaacgtcgcttttccacatactctattatggcgtgactgacactggcataatctaaacagtgagcaacatcatcggtttgggatgcgcgtttattatcccactccatttcgatatcgaacactaacttttgcttaatggttttttcccaatcataaacaccgattgtggttattactgataattgttcaataaatacgatatccatcacgtcatctcttattttttctgctcatcggataccacttccgatgaaatatgcgtattatccatacatgtctaacgaacgttcatcaacattggagaatacaaatgagtgctaacgcacttggaatgatcatcttcgcctatttgtgcggctcaatctccagcgcgattttgatttgccgactggcaagactccctgatccaagaaaatttggctctggtaatcctggcgccaccaatgtgctacgtattggtggtaaacttgcagcggcatctgtgcttatctgtgacgtcctaaaagggatgatccccgtttggctcgcctattacctaaatgtgcctcccttttatctcggtattgtcgcaatagcggcttgtctaggccatatttaccctgtttttttccactttaaaggcggaaaaggggttgctactgcatttggctctatcgctgctattggttgggatcttagcggactgattgcgggaacatggctactaactgttttactcagtggctattcctcactgggtgctattatcagtgcattgcttgccccattttatgtctggtggtttaaacccgaattcacttatcccgttgcactattatcatgcttagtactttaccgtcatcatgacaatattcaacgtttatggcgaggacaagagagtcgcatttggcataagctgaaaaaaaagacagagaaaacagataaagagataatccaagaagccaaagagcaagaaaaagaagattaacgcttatccttattaaaaaaaggtcatttattaactaagtgaccttttttatttaataattaaattctattataaaatataaataaattaaaaataatcacacataaaaaaaacaccctttttatattcgaaaaataaaaataataaacaacattattaataatacccttctatatttagattaaatatatcaatattggttttatttattacaaaaaaacattaaaaataaaaatcttaaataagataaacttatataaaaaatcaaaattaacgaaataaatcgcttgaaaaaaaaccaacttacatctattaattaataaccataaaaaaataatcatttaactctgtgaaacattggagttcaccatgctacaaaaaatatctgccaataaaattgcattaataaaaagaatgcaacttagtactcctacattagtcgatattctcgatagtttaggaaaaaccattgtattaaatagtcaattaaaaagtattaacctagaaaacttttattctgttggacaagcttatactgtgcaatggaaattaattagaaaacaaaaatctattttaaataaacaaccttctacgtgggaacaagttagttcttttttagtccctgaaataacagatgcaaaaggattattctatatagccggaggacatgaactaataacagaagcagcacttgcaggtggcatgagttgtacttattttgaaaaattaggctttgaaggagttattttagggggagcggtacgagacaagaaagatctcaccaatctaaccattccagtcattgccaccaatcttactcctacagatacacaaggcgcttattttgtcagtgagactggcactcaatgcaccattgagcatgccacaatctgtagtggtgatttagtgatatccgaccctaatggcaccgtgattatccctttttcactcgtcgataatgttctagaagaagcgattaagatagatagcattgaaaataacatgctagaaaaaatcaaacatggacaacgtttaccagaacttatcaatataacgggacgtatataataaataaaggtgactgaccatgataaatattcatacattgggtcctgcaggaacaaactgtgagaaagccgcttattattggctaaataaaaataatcaacaaggaaatattattcttcaccctacattagaaaccgcagtaaaagaaatggaggtaagccaaaatagtattctattaggttgtattgtttatccttttttacacaatattgtttttaataatctctcttttatcaaattaacagattgttttgttatggatacccataacatgctatttgctagccgatttaataatattaaggagataaaaaagttaggttctcatcccgcaccacaagatctatttagaaaaataacagaactcgataatattgaaagagttctttttaattcaaatagtgaagcagcacttcaatgtggtttagggcgagtagatggctgtattaccacacttagtgcagctaaaaaatatcatttaaatattttatatgattttggccctgtccctatgggattttctattcattcaaaattaaattaagtaattaattacatcacaacagtcaaaacgttaattatctagtcacttggttaataaaaaggaaaaaactatgagcttatatttatctagtgaaatgatctcttatgatatggatctaaatagaaacgaaggtgaagaaagtaaaattcaagctaaatttattcatggctctaattttacaatggcattttggacatttaaaactaatgccattattcctgaacataaacatgaacatgaaactgccacatccatactaaaaggctctttgaaactgacggtaaataaccgcattgtttatttacatgctggcgactcttttattattccctcatgggccgttcatcacgcaattgctttagagccttctgaggttattgatgtctatacccccgttagagaagactatgttgcaaggcaaaatggcgttattaaaacctatttagaaacatctcaaccccaaggataacaaaaagcgaggatcacctcgctttttctattcttactataatcgcaggagcactttctatgtttagtacctataatattgatgttttaacagaacaaaatcatcaatatttaccaatagaaaacaccctatcattacagaatatattttccatctcttggcacccatcattatggaaatctttacccgccaagcaactccctgaatacccagatatacatgccttaaattattgcaaagaaaagcttaagcattatcccccgctaattttagcttccgaaatcagagcatttaaaaatttattaaaacttgttgcaaatggtgaagcttttcttctgcaaggaggagactgtgcagaatcttttgatgattgccaagccactattatccgtgatttaacattcactttatcgcaaatgtccgcattaattgaacaatcaacgggattgccggtgattaaattaggtcgtatggctggacaatacgctaaacctcgtagccaagcatttgaaacacaaaatggcttaactttacccagctatcgaggagaaattattaatggtcttgatttttcagttaaaagtagagagccagatccgattagaatgataactgcctatcatcactcagcagcgaccttaaatctgttacgtgcgatgaattatacacaatataccaagcaacaatgggccttggatattaacgctcatcctggctctacagagcctgagcattatttccatttgctagaacaactctatcattcacaacaccatattattaataaacagcccgatacctcttcctattatgttagtcatgaagctttgttactgcattatgaggaatcgatgactcgtcaagattccattgacaacaaatggtataactgttcagcacatatggtttgggtaggagaacgaacaaccgatattgatcatgcccatatcgagtacctacgaggtattgaaaaccctatcggtataaaatgcagcaccagaatgtctggagaaaaactgattaagctaatagatactcttaacccgagcaatgaagttggaaaaattatcttaatcattcgcgtgggtaaagatgctattcatgcatatcttccggaattagtaagaacggtaaaagaacatcaacgagcggttatttggcaaatagatccaatgcatggcaatacacaatcagcaaatgacagtatgaaaacccgacatttcaatgatattgccgaagaaactcgtgcttttattcatattttacatgagatgggcatacaggctggggggatacatttagaaatgaccggacaagaagtcactgaatgtactggaggattacaacaaattcgatacactgacctaagtcatggttatcaaactttatgtgatcctcgtcttaaccggacacagtcattagagttagcgttcttggttggacggcattggcataattcactttaattgtaaccaaatataagtgcttagtacttaagccaagcacttatcattaccaacaccgccaatggctaattatttatccgctaaagcaggtaattcagctaaaggccaacgcggtctcactgtcacccctaaaggcccctcggtaccacctttaaaacggatcatccccgccaaagcaatcatggcaccattatcggtacataactcagggcgagcataaaacacttcccctccgagttgttccattatcattgccattttggcgcgtaaagtacggttagcacttacaccccccgccatcactaagcgtttaaagcctgtttgctctaatgctcgacgacattttattgccagagtatctactacggcatcttcaaaagcacgcgcaatatctgctcgagtttgctctgaatcatcgttttgacgaatagtattagcggcaaaggtttttaaaccagagaaactaaagtcgagtccgggtctgtctgtcatagggcgaggaaaaacaaaacgtccttctacaccttgttgtgccatttttgataaaacagggccgccgggataatcaagccccaatagcttggctgttttatcaaatgcttcaccggcagcatcatcaatagactcacctaacagggtatattccccaatccctgttacactaattaattgtgtatgcccccccgagacaagtaacgccacgaaaggaaaatctggcgttttctcttcaagcatcggcgctaataaatgcccttccatatggtgaactggaatagcaggcacatcccatgcaaacgccagagaacgaccaatagtcgcccccaccagcaatgcccctaccagccctggtcctgcagtataagcgaccgcatcaatatcttttgcagttaaatttgcttctttaagggcggcttggatcagtggcactgttttgcggatatgatctcgtgaagcaagctcgggaacaacaccaccatagtcggcgtgcagttttatttggctatagagttgattcgctaacagaccggctttatcatcgtaaattgcgataccggtttcatcgcaagatgtttcaatacctaaaactcgcatgacgcttccaaattcttcctcgcgcaatggcgtaatggatcgattgtagcattatttcactaatttaatacgctttcgccacaacttttacataccagtatgtgacaaatttctttttctggtctataattatccacctattttacatgatttaaatgtgtggttagcaactatcacgttgtgttttgaataaattaagacacaaaagtgagagtttgcgtttcaattttgtgcatctctttacaaagtgccctgctttgaagtaaaattccgcaccattttaaatgtcggctggctaaaatcatgccagcacaaaccgatttctattgaggtgagaggcacatgccggtaatcaaagtacgtgaaaacgagccatttgacgttgctcttcgtcgtttcaaacgctcttgcgaaaaagcaggcgtattagcagaagttcgtcgtcgtgaattttatgaaaaaccaacgactgagcgtaaacgcgctaaagcatcagcagtaaaacgtcacgctaaaaaattagctcgcgaaaacgcacgtcgtactcgtctgtactaatattttgcggctgataccgcaatttatgcagacactgtagtcgcagttaaaaggccgtgctttcttatgagagcgcggcttattctcgttcaacaacaggcgtaaaagggcttatggctggacgaattccacgttcatttatcaatgatttattagcacgaaccgatatcatcgatcttatcgacgctcgtgtgccgcttaaaaaacaaggcaaaaatcattcagcgtgttgtccgtttcataatgaaaaaacgccctcttttacagtaaatagcgacaaacagttttatcactgttttggttgcggtgcgcatggcaatgctattgattttttgatgaactacgacagacttgattttgtcgaaaccattgaagagttagcagcaatgcatgggttagaagttccttatgaatcaggaactggcagtagcccgattgagcgacatataagacaaaatctctatcaagtgatggagaaattgaatcagtattacaaaagcaccctcaatacccctgacgctcaggaagcaagaaattatcttgcgcatcgcgggctaagtgaagaggttattacccgcttttctatcggctttgtacctacgggttgggacaatatcctaaaacgttttgggcaaaatcccgataatcaagccctgttacttgaagcaggaatggtaataacaaacgataaaggtcgcacttatgaccgttttcgtcagcgcgttatgtttccgattagagacagacgaggtcgtgttattgcatttggtggacgtgtattaggtgatgatttacccaaatacttaaactccccagaaacagagattttccataaaggccgccaactttacgggctttatgaagcacaacacactcaccctaacccagctaagttattagtggttgaaggttatatggatgttgtggcattagcgcagtttggtattgattatgctgtcgcctcgttgggtacatcaacaaccgcagagcatatccagttgctgtttagaactacggataacgttatttgctgctatgatggtgatagagcaggacgagatgccgcatggcgagcattagaaactgcactgccttttttaaacgatggccgttctttacgttttatgtttttacctgaaggcgatgatcctgattcactggttcgccgcgaagggaaagaggcatttgaaaaacgaatggaacaagcacactctttatctgagtttttatttgattcgctggttccacaagtggatttgagcacccaagaaggcaatggcaaactctatagtttagcgcgcccattaattgatcagatcccaagtgagactttacgtctatatttattaagagagcttggaaatttaacgggaaatcccgatattgagcagatggatcgtttatttggtagaaactcgctacatcacgaaacatcgtatcaaccgacaaaactacgtactacaccaatgcgtattttaattgccttgttgatacaaaatcccgagttttgccaattagtgccaccgcttgaggggctaaatacagaaaaaatagcgggtttatcgctttttattgaattagtttctctttgccaagcgcagccaggcttgaatacaggtcagattatcgaactctatcgagagaataaattcggtaaacaacttgaaaaactggcgatgtggaacgatatagatatagatgagatagctgaaaaaacatttacagatacgttagatcatctctttttaaccgcaatggatgaacgtttaaacgccctcattgccaaagagagaactgaaggtctaacacaaaatgaacgcgaagaagtccaattgataatacaggctcgcgttaaaaagtaaaacctaaattaagattaaaaacacggcttaattgccgctatcggtaggtataaaaaataacctacatttgctacgctgaggggatcgtagcaatcgacaatgaaaatgcccctccgtagttattgttggctgaaccgtttatcgccgaccgacaccaacccaaattactttgaagtgtggataccgtcttatggagcaaaacccgcagtcacagctgaagctacttgttacgaaaggtaaggagcaaggctacctgacctatgctgaggtcaatgaccatctgccggaagatatcgtcgattcagatcaaatcgaagacatcatccagatgattaacgacatgggcattcaggtcatggaagaagcacctgatgccgatgatctgatgttggcagaaaattcaaatgacactgatgatgatgctgtcgaagccgctgctcaggtactttctagtgtagaatctgaaattggccgtacaaccgatcctgtgcgtatgtatatgcgcgaaatgggaaccgttgaactgctcacccgggaaggtgaaattgatatcgcaaaacgtattgaagatggtattaaccaagttcaatgctcagttgctgaatatcctgaagcaatcacttatcttcttgaacaatatgatcgtgttgaagccggtgaagcgcgtctttctgatttaattactgcctttattgaccctaatgccgaagaagtggcagaaagtgatgatgtcaatttaggcaaagacgacgatgaaatcgacaacagcgccgatgacgaagatgaagacgaagatgaagatagcgacacagacagcgatagcgatgatgataacagcatcgatcctgaacttgctcgccaaaaattcaccgagcttcgtgaacagtacgaaaaaacgcgtcaatctattaaggccaaaggtcgtaatcataaagataccgaactggaaattttacagttatcagaaattttcaaacagttccgcttagtgccaaaacagtttgattatctggttaacaacatgcgtgaaatgatggacagagtccgtgctcaagagcgtcacatcatgcgtctttgtgttgatcaggtcaaaatgcctaagaaaaacttcattactctgtttacaggaaatgaaactaacgacacatggtttactgccgctcgtgcgatgaataaaccttggtctgaaaaactggcaggtattgaagaagaagtacaacgtagcttacaaaagttacaacaaattgaagttgaaacaggactgacaatcgaacaggttaaagatattaaccgtcgtatgtctatcggtgaagcaaaagcacgccgtgcgaaaaaagagatggtcgaagcgaacttacgtttagttatctctatcgcgaaaaaatataccaaccgtggcttacagttccttgacctgatccaggaagggaatattggtctaatgaaagcggttgataaatttgaatatcgtcgtggttataagttctcaacttatgcaacatggtggatccgtcaggctattactcgttcaatcgccgatcaggcacgtaccattcgtattccggtacatatgattgaaacgattaataagctaaaccgtatctcgcgccaaatgttgcaagagatgggacgtgagccttcaccagaagagcttgcagaacgtatgctgatgcctgaagataaaatccgtaaggtactaaaaatcgctaaagagcctatctccatggaaaccccaattggtgacgatgaagattcacatttaggtgattttatcgaggatactaccctcgaattacctctggattcagcaacatcagaaagcttacgttcagcgacacacgaagtattaggtggtttaacactgcgtgaagctaaagtcctgcgtatgcgctttggtatcgatatgaataccgaccatacattggaagaagtgggtaaacaatttgatgttacccgtgaacgtatccgtcagattgaagcaaaagcgttgcgtaaattacgccacccaagccgttctgaagtgctacgtagcttccttgatgaataatcaatctctttgattttggtagtaatacaaacgcctgtgactcacaggcgttttttattatctggtctaaaccatatctgttttcagcgctgataatttgcttttatcatccctattctcttttggtctatcttaagtaaccgctatcgttttcgctaaaaatctgctgattttttctacctctatttacaaaaaatcacccttttatttttacccttgtcgattttttactcatcaagtctttctttttagactatctcattgaaataaaagattattatttaatttattttttctgctctatattgaacacaaattgcgcatacagtcacacaaaggctagacctcgcctcaaatggcacgtataatctcacaccattaaggccccttagctcagttggttagagcagtcgactcataatcgattggtcactggttcaagtccagtaggggccaccaaattttagctgttaaatcagcatattaagccacttcttagtaagtggcttttttgtatctaagggttattgccccctttttgtcccctgagatttttttactgccctaatttttttcatgacatgttacgacaacttttattttctcaaagtatgtcatgctaattttccccaatatatttgtaattcatttcagtttcaaaaatctctatagccaccagcttaacggacagttcgccagcacgcggaagcgcatcacaaaaccgaccatgtagtttggtgtatttgtgacaaactgtgctcagcatatacagatccccctccttactactgacgaaatttgatggagatgtaggtaaatcgttccaatataaaaaccagatttttgtttttttaactacataaaaaatataattaatttaaggtaagtattatattattataaaaaattgtaattattattttataagggtcggtatgtatttttttcttggttttttgttatttctaattgttttgatggttatttgcaggattagagttttatggttggcaagaaaaaatacaataactgaaaagaattttaaaaccttcaaagagtataacaatattgaagattatgaaaaagaagcaaagcaagctgtttatgctgcaacaataagcaaaactctttttgaagaatgccaatgtctcataaccttaagaacaatgcttgaatccctacacactgattatgaaaaatatgaaaaagtaaatccgttattaatggagctattacgcaaaaaatttacttttacatactccgctttcattactatctatccagaacccatcgaagaaagcgggctagaacgatttagtttaattaatacaaaaaaatactgtccagaacatgtatggaaacatattctcaaatccgctatttataccaatgaagaattggatgactattttgggtcgcaggaattactcccactggagcggatgtgtacagatatggatttatataacgagtttaaaggcacggttttatttgatgaagtgatcgggtgctatgttaatgaagaaaacgaaggatctcaaatttttgataatgaggtttattctgttaccgaagaacagttacgccagtggctagatgaagagcttgcatttctgagttatgtcactgaaggtcttttgaatatttgtattgaatacataagaaaagagaatggaattataagggtttgaagtgatggacaaaaacaaacttaaaaatcttaagttttttttgaaaataccccattggttcagcatttgaattattccctttctgaagatgaggaaagaaattaagtgtattatgaaagtctgaactttcggactgggctatatcaactatattgttgatataacaatcttaatctttcaatagaattaattagattattatttattttattgcgataataacttaacaaactttctttttatatcactactattatggtcatacgtcctaatcaacactggttttttcggttatttgattggcacggttcagtgctatcaaaaataatctttcgtttatgtcttaatattgcaatgtctattatcgctattttggtttatcaatggtatgaattattaggtattcatttaactgttgccccatttagtttattaggtattgctatcgcaatatttcttggttttagaaataatgcaagttatagtcgacttgtggaggcaaggacattatggggaaatatgttaattacccatcgcaacatattaagaaatataaaagccttattaccggaagataaacaatttaatcgtgacttttctaatctacttattgcttttagttggagtctaaaacatgagctaagaaaaacaaacccaatggtcgatctctatcgcctcttaccccgacctttatttgatgagataatgaatagcccttaccccactaatcggattttattacatattggcctaaaaattggcgagttgcgagataacaaagtaataagtgatgttatctttcaatcaattaataaagatattaataacttatctgatgtattgggtggctgtgaacgtatttcaaatactcctgtaccttttgcctatacgctcatattgcaacgtacggtatatctattctgtgctctgctaccttttgcattggttgccgatctccactatatgacgccatttgtttccgtatttatctcttatacttttttatcttgggactcattagctgaagagttagaagatccattcggtgtttctgccaatgacttaccattaaatgcaatatgtaacaccatagaaaggaatttattagagatgcaagatatcactccactccccatcagagttaaacctgaccaatattataatttattgtaattaataaaataaaaacaaataaaaaaggcagtgttaattaataacactgccttttttattaataatacatcttttatgttattaatgcgttctcattcctgcgctgtacattaataatttaaataatgaggcgataattgcaagacttaatacacttaaagaccaaataattatcatccatccgatttgttgataccaacgagctttatttttcgttggttttattgttaaaaaatgactaatgataactttcattggcatttacctttccacgaaatacataataactccaactggtataggctaatatcacaggaataattataaccgctccaactaacataaattgctgacttaaaacaggtgctgccgcctgccaaatcgaaatagaaggtggaataatataaggaaagatactgatccctaatcctgcaaaaccaataagtaccaataaaagtgataatagaaaaggctgataatgaccataattataggcactacgaacaatgccccaagcacaagccaatacgagcaacggaacaggtaataaaaaatataaattaggtaaactaaaccagcgttgtgcaatatctgcatgtgtgagtggtgtccataagcttactattgcaatcaccaccagcaatgtaatagccagatacaccgttatagtgcacattttacgatgcagttgatgctctgttttcataatcaaccatgaactgcctaacaatgcataagtgactaacaaagcaaaaccacagaaaatagggaatggtgttaaccaatccaatgccgagccactgaaatggcgctctgtcacattaaaaccattaataactgcacctactgtgatcccttggcaaaaggtagcaagaaaagagccaccaataaaagctgaatcccaaaataggcgatgtttaggaagtgcgttaacgcgaaattcaaatgccacaccacggaaaataagcccaataagcatcaatgtcagtggtattgttaacgcatcaataataactgcataggcaagaggaaaagcaccatagagcgcagcccctcctaatactaaccatgtttcattgccgtcccaaactggtgccacactattaatcatggtatctctttgtattttatctcgggtaaaaggcaaaataatgccaatccccagatcaaatccatctgcaataatatacataagtgtggcaaaaataatgatcgcaaaccaaatcatcgaaaaatcaatattcattatttttcaccctgtgttaattggtcggatttaagcactacagggcctttcttcatcagatgcaccatataaaaatacccgatgccaaatactgaaaaataaaccaaaataaaggccaataagctcaaactcatttgaatatcaccatgagcagaaacggcatctttggtacgttgtagaccataaacaacccaaggctgacggccaatttctgtggtaaaccaccccgcaaggatcgcaatcagtcctgtaggccccattaataaagcaaagcgtaagaaaaagggtgagtgatagagtcttttcttcttacgtaaaataatactcaacaaacctaaacaaatcatcagcatacctaatcctgccatgactctaaatgaccaaaatataatgctagaattaggtctatcttccggtgcaaaactttttaatgccggaatttgcttatctaaactatgggtaaggatcaggctacctaaataaggaatttcaatcgcatattttgttttttcttccgccatatctgggatgccaaataaaatcagcggagtcgcttctttcgttgcattatcccaatgcccttctatagctgcgattttagccggttgatgttctagtgtatttaatccatgagcatctcctacaaacgcttgtatgggggcaataattagtactaaccataaggccatagaaaacatttttcgtacaggtgctgtattttgtccttttaataataaccatgcggcacaagaggcgataaataaagcactggctaaaaaagccccaatagacatatgcaataaacggtaagggaaggaaggattaaacacgacctgtagccaatcaacaggcacgacaacaccattttcaatagcatagccttgtggtgtttgcatccaactattggatgacaagatccaaaaagtagaaatcaatgtgccaagcgctaccatacaagttgcaaagaagtgaagttttcgccccactttattccaaccaaacaacataatgccaagaaatcccgcttctaagaaaaaggcggtcaagacttcataagttagcatcggccctgtgatactaccggcaaattgtgaaaaaccactccagttagtcccgaattgatatgccatcactaaccctgataccacccccatgccaaagtttacggcaaaaatttttatccaaaactgatataaagaaaggtaacttggttcttttgtttttaaccataagccttctaatagggctagaaagctagctaatcctatggtgatagcagggaatataatatgaaatgaaacggtaaacgcgaattgtattcttgctaggtgaaaagcatctaatccaaacataatgcctctctcgatataaatctatattctataaatttattcattttctattatcctaattatatttttctcacaaaaatcttatttagtttttattatgaatgctgattaacctcactttattttcagaaagtaaaaactgaagatagtgagtttatatagatatactatttaaatccccctctcttaattactaaaaaagagaacaacaaaaaatcattacgtaataaatcacataacgataccatggtagccaacaaactgttatttcgtcattttttcaataaatcaagtttaaaaaacttgtccattagcgtattaacatttttaaccaagtaataacagagagtcaaataaattgattttatcacacgatagatatgctctatcatcatataaaataaagttataaagcgtcatttagcctattttactcattgacaatataattacattattttaacttcttaagtaacagaagaattgcagattatataactttaataccaataaattattatttattggtattaacaagtctaaatatatcctttatttctagtaagaaatatattttaaattatataaccttattgctttttatattcacctgctaactattcatcattaaatattattattaacgttttaggaatgtctatatgagtaagaaaaaatcacctattcctggagtgaaaccctataatggacccgcaggaggatggggggcattaaaagcaacagctatcgcggtacgcactcaaatggatgcttttattgcacctaaaacattgcttaatactaatcagcctgatggttttgattgccccggctgtgcatggccagacaaagagcatcattctactttccaattttgtgaaaatggagctaaagcggtcacatgggaagcaacaaaaaaaagagtcacacctgaatttttagcacaacataccgtaacagaattgctgacaaagtcagacttcgaattagaaggctacggtcgtttaacccatcctctcgcttatgatgcagatactgacactcttcgtcctgtgacttgggagcaagcatttactcgtattggtgagctattaagaaatatgccatcacctgatagtgttgaattctacacctcaggtagagcttccaacgaagccgcgtatctattccaactgtttgcgcgagaatatggcaccaataattttcctgattgctcaaacatgtgtcatgaaccgactagtgtaggcttacctcaatcgattggcataggtaaaggcacagtttctttagatgactttgataacactcaactcattattgccattggacataaccctggaactaatcacccaagaatgatgggaacactgcatgaagtagctcgtcgtggtgtacctattgttgtatttaatccattgaaagaacgtgctttagagcgatttaccgaccctcaaagtgttattgagatggcgacttatagctcaaccaatatcgcctcatcttattatcaagtcaaagccggtggtgatgctgcggcgttaaaaggcattatgaaaaccttaattgagtgggataatgagcgtggagatattctcgaccacgattttattgctgagcatacactaggttttgaagccgtagttgaagatcttaaacaaacttcttggcaagatattgaaagtgaaagtggcctttcgcaagcagatattgagagtgtcgcactcctttatgccaattctccggccaccattattacctatggtatggggatcacccaacataacaaaggtacagcgaatgtgcgtctgattgctgatttgttattaatgaaagggaatattggtaagccgggtgctggcatatgtccattacgtgggcactctaatgtgcaaggtaaccgaactgttgggatcacagaaaaaccatctgtcgaatttttacaaaaaatagaacaaacttttggttttaaaccaccttataaacatggtcacgatgcagttaacgcaatgcaagcgatggttgatggcaaagcaaaagcgttaatttgtttagggggtaattttgccgtggcattacccgaccctcaacagtcatttgctgcaatgagaaagcttgatttaagtgtacacatcggcactaaattaaatcgctcacatttattaacggcaaaaaatacctttatattaccttgcttggggagaacagaattagatgtacaagcattaggtcgtcaatccatcacggtcgaagactcaatgtcaatggtgcatgcctcttctggtaaattaacacccgcttcaccattattaaaatcagagcctgtcattgttgcaaaaatggctgctgcaacactgacagatagcaaaaccccatggctaagatttacggaaagttatgatcttattcgcgatatgattgaaaaaaccattcccggatttgataattacaaccaacgaattcgtgttcccgggggtttccgtatgccactccctgccgttgagagagtttgggatacccccacaggtaaagccatgttctcggtatttaaaggtgtgaaagagaataaaatggtcatgggtgatgatgttcttcgtttagtcactattcgtagtcatgaccaatataatacgaccatttatgcacttgatgatcgctatcgtggcatctttggtagacgcgatatactgtttatgaataatgtcgatatgatagcaagaggcttaaacgaaggtgataaagtcaccattgaaacggtcagcgaaaatagaaaactacagcttgataatataactgttgtttcatttagcattgctcctggcacagtggccacttattacccagaagccaatgtccttgtaccattagattatattgataaagagagtggaaccccctcttataaagcaatacctgtcagaatttatgataaaaaaacacaagtcgcttaatcataattcatacgcaaaacaaaaaacaaaggcgagctatttattaatactcgcctttttatctctatccatctatagacctgtactttctaagtaagtacgcatttgtgcaaaacatttttcaattaatatagagcgcggctcttctttgcggatcacaatccccaatggggcattaatggttgcatcaacaataggtacaacatctagatcttggctgagattttccatacctttagcaatagggacaatcgaggtgcaaaaccctgcattaactgattgtataagatgtaatgtagaactactttcgaccaacaccttggggtgtaagttataacgctgaaaagctaaatccacggattgcctaaagtgattctctttatttaataaagccaatggttgtttaaccgcttcatgccacgagatagttcttgttgaaggcataaagtgattgcgatgaaataaaagccctaactccgtttgttttaatgcataaatttcatgctgttgagtattcgctttttccaaatagcagataccaatatcaagactattactattaagtcgatctataatattttcgctattcgttgagagcacctgaaaacttatctctgggaatagtgccgatattttctgcaacatcagcataggatttaaattggttaaaggcacaatacctatacgcagttgcccaaatagttgctgtcgaaagttagcggcttctgcttgtaatccatcgtaagcagattgcatagttttcgcccattttaatattttctcgccttcttcggtaaatccctcaaagcgagagctacgcttgataagaaccacatcaagctctttttctaaattacgtaatcgcattgataaggtaggttgcgtaacatggcacatctcggcagcttgaccaaaatgttgcgttttatccaaagcgattaaataaaataactgtttaatatcgatacgcaataacctcgtcatttgcaggtgaagggaatagttatctgtttttatattgcactattaacaacactaaagtttgcgctgtctataattatttttcaataataaacgaagagaaaagaaataatcgccttatcgattagccataaaataaaaaaaactcaccctaatatttcaactaaggtgagtttatttttactaaaatattaatgtattaattaaagataagcttattctttgatttgaaaaactgatactttatcgatcagattttgtgctttttcatctaacatcatggttgaggtggctccttgttctactaaagccgcattttgctgaaccacagaatccatttgatttatcgcgacggctatttgttcaattcccactttttgctcttccgatgcaatgctaattccctgcatgatatcgcttactttggtaattgaggtgacaatttcttgtatatgctcaccggttttattaaccagttcacgaccatgtgcgacatccgccacagaagctcgaataatctgattaatttcacgagcggcttccgcacttctggccgctaaattgcgaacctctgttgcaacaactgtaaaaccccgcccttgctcccctgcacgagcggcttccactgccgcattcaacgcaagaatattggtttgactggcaatattgtttaccacgtcattgatttcagcgacttttaacgtaccgacttcaatttttttcatcgaagtaatggcatcattcataatgctagcgccatcgatagccaaatcacgcgtttgtgctgtgatagagtttgctaatacggcattattggtattattcactaccgcaatttttatctcttccatgctggctgcggtttgttgcaatgcactcgcttgctcttctgtacgagaagagagatcttgattacctgctgcgatttctgctgaaccgcttttgatcactaatgcctcttctttcaccaaaccaatagtcgatgtcagtgcattttgcatatcaccgacatgagaaaatagtgtaccaaactcatcttttctatttttgggtaacgagaagtttaaattcccttctcccactttttgcaaaatggcagagagcgtattgaggttaaagagaaaggttttattaacccaacggatcactaaataaagcagtccaatcagtatcactaaagcaatacatgtagtgtaaataaagagttgaaacatccatttttgttcgtcttcaatttgatcattaacattttgagttatcactaagtattcatcaaacaactcagcaagttttgaaaaatctttcgataaatcaatattttcataagctagcgtatcaataggcgcaataatagtatcgacgagtttgataaatagtgccgataattgttctgagtttctttgtgcgtcagcactgattttgctttccctttcccaagcgttaattgtctcttttgatttagccgctaatgttttagcttcagaaactaatcgagctttggtttcttgcatatctaaattttcatgaccaatattgactaaaaagttaacatgagagcgtatggttgctagttcatatcttgcctcttgtacattatttaatctcgtggttaacgagtttaatgaagcaaaattatcctgcatttgataaataaaaaacgatgataaagctgatgtcactaagaaaatagctaatagtataatagagcctactttcgctgttctttcaatactcatgaaataatccaccccggtaattaaataacataaatgtattcatatatcggcagtggatagattttatttactcattaatcagaattatcgacacaaatgttttacacacaccaccctcagtgataaaagatgatgttttatactattatcgtagtttattcttgttcattgattaactcttgtttctgctctggctctttttcaagatcgtcaatattaaagactgcgacattatccatcagcacttgtgctttatcgtttaacatcatggtagaagaggcggcaagatcgaccaaagaggcattttgttgtactaccgtatccatttgattaattgctactgcaatttgttcgacaccaagacgttgctcttccgacgctaaactaatcccttgcatgatcttgtttacttttgaaatggaagagacaatctcttgcatgcactcaccgcttttattaactaaatttgtaccataggtaacatcattgatagatgctttaagaacttggctaatctcttttgctgcttcagcactttttgcggctaagttccgtacctcagcggccacaacggtgaacccacgcccttgctcgccagctcttgctgcttctacggcagcatttaaggccaaaatattagtttgattggctaatttattaataacatcattaatttccccaactttcactgcaccttgttctattttcttcatcgataacacggcttctttcatgacattagcgccatccataacaatgtcagtagattgattaataatattatttgcttcaattgtgttatcggtattgttagcaacggctattttgatctgctccatactggcagcggtttgttgtaaagcactggattgttcttctgtacgagatgaaagctcttgattaccagaagcaattttaaatgcgcccccttttatatccatagcctcttttttgacagaaaagattgtcgaggttaatgctttttgcatatcactgacacgggaaaaaagtttaccaaactcatcattttttacttgtggtacagaaaaaaccaagtcagcattacctactttatttaatatctcagacaatgtattaagattagagacaaaggttttattgatccaatgaagcacaaagtacaaaacaattaataaaataattaatgagataattgttgagtagatagaaaactcaaccattgaatcttgtttatgagtaaggtagagactatttttatttctagtctgaatatatttttcaaataattgatcaagatgttcaaaatcttgatcaaattgattagcttttatctttattgtcgctaatttattaggatctaaaactaatttatctatcagattataaaataacgtcgaaatatcatcagcatttttttgtgctgcaacagtcattttcttctctttcacccatgtttccatggtgtttttagccatgatagctagctttttattttgctgaataattttgttacgatctgcgacacgactatctttgtcttgtaatagataattgacattagaacgcataatagccagttgataacgagccatcaacacatcgtcataacgtgcagataagacatcaacttgagtaaaattgttttgcattttataaataaaaaatgaagataaggcagacgatagaataaaaatcaataacagtaaagaagagcctaattttacggttcgtttaatactcatgataaaaatacctatatgcgcatatcgataagatttattttttatcgacacaatgatatttttatttaattattagagataacactaggtcattgatttttattttaaataaatttttatatcataaacaaaataagttatttttaataactgctataattattagtatattataaaataaaacaaaccaattcttttaaaacataattcgctatcaattagtgcattcttctttatgctcaatatcaattttcattttatatgactaatatcatcaacgattaaaaataaaaaccttattttttcaataagatactgatgatactatctcattttgagaacaatgatataataggcgctttacctcataaactctgatgatttacggagctcaatatttatgcaaccacaatttgaaaacgcaaaaaacaccgtaaaaacattatcagtgtttgattttgatggtactttaacctatcacgatagctttatcccttttctaaagtttgcctttgggcgtcgtaaatttgctcgtcgtattatcaaaatggtattccccacattacgttgttttagacgtaaactgactcgtgatgaattaaaagaagtgctgattaaaacttttttaaccgatatcaaagaagaatggctcaaagaaaaagccgaagccttttgtaaagcttactggagtaagttaatgcgtcctgcaggtttattagccgttgctgaagagattaaccgtcatgctgaagtgaccatttgttcagcttctccagctatggtgttgcaaccttttgcggatcgacttggtataaagttaataggaacaacacttgaagtggttgatggtgtgctgacaggaaaaatcattggcaataactgccgttgtggcgaaaaaatcaaacgattagagcgtgtctatggcgatcttactcaataccacttaagggcgtggggcgattcacgtggtgatcatgaattactctatgctgcacaagatccacattggcgctatttccacacaggaagtaataagtcaaaaaaatcacctattaaaataacgcttaaaaaagactcataagtgtttatataaaaataaagcgggaaacgtattttcccgctttatccataaactaactatttatctagtcatcttggcgcttttattagcgaaagattaaatattgacgccatgttgtgcggctagtgcgcctaaaccacccgcaaaaccttggcctactgctttaaatttccaatctgaaccatgacgatagagttcaccaaagatcatcgccgtctccgtagaggcatcttcagaaagatcaaaacgtgcaatttcagtgttattgtcgttattataaacgcgcataaaactgttgctcaccataccaaagttttgtttgcggttttcagcatcgtaaatagtgacagcaaaaaccagttttttcacttcagcaggaactttggataaagtgattttgacttgttcatcatcaccttcgccttctccagtacgattatcgccttggtgttcaacactaccacattggctcactttattattaaagaagataaaacttgcatctgaaagcacttttccatcttcaccgaccatgaatactgacgcatctaaatcaaactcagcgccatctgtcacgcgggcatcccatcctaaaccaaccatagccaccgtcatggttggtgcttctttagttagcgaaacattaccacctttaacaagggaaacagccatatcaaagctcctactgtgttgaataaactgacaattaggaataactgccagtaatttgtgatttcataacatacgattaagaggcgttaataccatattgcgcacatactgagcctaagccccctgcatatccttggcctacagcacggaatttccactcaccgttatgacgatataactcaccaaataacatcgccgtttccgttgatgcatcttccgttaaatcataacgagcaacttcaatttggttgtcatcattaactaaacgaataaacgcaccagatacctgaccaaagctttgacgacgcgcttgcgcttcatggatagtcactacaaagataattttttcgacatcactggggatggtatctagtttgatttttagtgcttcatcatcaccatcaccttcacctgttcggttatcaccagtgtgaacaacagagccgtcggcagatcttaagttgttataaaaaatgaaatcggcatcgctacgtacttttccattagcggctaacagaaatgcagatgcatctaagtcaaaatcttgaccatctgtagaacgggcatcccaaccaagtccgactaggacgtttttcatcgttggggctgctttgcttaaagaaacattaccacctttagaaagagaaacgctcatcttcaacctcttcaatttatgttgcgatattctaatttcccaagaatatcggttatcattatttaccttatttattctttttttctgggaatacaaaacttgccagaatacccagagcaagaacaccaagcactacgaataggctggttgtcgcggaaatgctatatccatgctgccaaatatgatctgttgcattaagccccagctttacagcaataaagaacagcaatgcaataaccgctttttcaaggtgaatcagatactgttttaatgcctctaacacaaagtagagagtacgtaagcccaaaatagcgaacatcattgcactataaacaatcagtggctcacgactaacggcaatgattgcaggcaccgaatcgaaagcaaacatcacatcagaaagctctaccaccgccacacacaacataagcggtgtcgcatataacgcagcttttgtacctcgcccgatagttatgtctttgttttccggttttgctaactctacatcaacctctttttgtgttaataagaaggcatgtccagtaatttttggccatatagggaaaaatcgttttactaagcgataagcaagatgctgtgaatagtcttcaatttcttcactatcattcccacttctcagcatcattacggctgtccaagcaacaatcagagcaaagactatctcaacgtaaggccctaaacttaataagccggtaccaatagcaacaaagatcgcacggaatacaatggcaccaatgatcccccaatacagaatgcggtgacggaaacgatcaggaaccgcaaaccaagagaaaatcgccatcatgacaaataggttatcgacagacagtactttctctaatgcataacccgtcacgaataagcttgcaacttctgcaccatggtggacgtataaaaaacccgcgaatgccatggcaacgactacccagaatattgaccaaaaaacagcattctttaacgttatcggcttatctgcacgatgcataaataaatcgataaaaatagcgcctatcgcaagtacaacaaaaacaatgacagtttctgtcggaaaaccaatatgtgtggataccataattattcctaaacggttccctatataaaattaattacaaatcaaactctgcgggctcaaagcctaatgcaacggcaatagcacgcaccgcctctttttcgtcattgtcaaaatcaccatcacttttcgcaacagcaataccgacacggatcgctaattgtgcagcttctggctgatctttcattgccagaatatacttcatcgtttcacctttaccgacttcagtatcaaattcaaaactgctaattagcttattaaagaattcgatcacctcggaggtatcaaagactttaagctcttctgatgcttttaaaaaaccgagcatcttctgcttttcttcagaactcacaccatcgctggcaatagcgatacgagcacaaactgcgaccgtaccttgcataaattttttgtttttaaaacgactgacttgcttagttaactccgctcgcccggaattaaaaccttcttttaatttattgaaaaaactcatttttattctccttatttcgtgtattcacttagatccagcagtccagcgaaatccccatccgtaggcattatccatatcgcgatggcctttaaaaaattcattgagacgttcaactttgattgatccgttttcattaacaagtcgtgcaatggcacacatagctcgaccattattaccatccgttaaacgtgtttcgataggtggttgctcgggaacatgaatagtgaccacaccatctgttttactccagttaggaaccccttcataaataaaagtaaaaataagcacttgcttgatatttttccattcacgtccattgataaaaatccactcgccacccgctacatcaccagtgcgatcatcaccttgtaactcaacataaggcatgcgattaaaatcaccgaatccatttcctaaggcttggatcactgacttataaccatcttgtagttcaacaaaggcgccaatatctaaatcaatacctttgttaccaccaaataatccacctaataacccggaaccactgcttttactttctcgatgccaatcgaggttaatgcggattttgccgaaatcatcctttttagttaagctaattgcaggtttctctttagttagcgaaaccttgcttaaattcactgagctcggtgctggtgctggtgctggttcaggatcagcaatatcaacaccaaaatattccgccaatggttttaatccaccgttaaatccttgtgcaataaaccgaaatttccaacttccattgcgacggtatagctcacctaaaattaatgccgcttcagtgcgtccatcgatatcaacatggccgttcgcaacgacattattgttagcatcaacttgaatagacaaatgttgtagatgagcaatggtttgttgcccttcacaagttgcagtaaaagcaattctatcgacatccggtcgtaagcgagttaagtcaaccgtaaacgacgtgctattacctgctgttgcataaataatagtacgatcatcattagtggtttgaccataaaacaccatatcagcatcaccgttcacttttcctgaggcataaagcctaaatgcagatacatcaacaggtgagcctgagtgaatacgcaccattaacgtttgatcaggtacggatatatttccgccaggtgttagggtcatttatcgcaccaccgtcgccaaaatatctggcatcatctcgtcaatgacaagccctttacaaggtgagccaaaagccgtgaaatcccattgtccttgattacgttgtaaagcggcaatcacgatccctgtatgagcgccttgttccgttaatttgtaatgagcaagctctttattggttgttttatcgacaactcgacaaaacgcattttcaacttcattaaaggtctgcccacggaaactattgacagtgaaaaccaaatattcaaccaatgaaggaagacgatttaaatcaacaaaaatagtttcatcatcaccatcaccctctcctgttaagttatctcctgagtgaataacggactgacaagttgattttagtttacgaaaccaaatagtatcgatttgtttaccatttacatcgagtaatacacaacttgcatctaaatctatcgaattattaccaccaaagagtccaccgagaaatccctttttcttaataggatcccagcctaaaccaaacattaggtgactcagtgcaggggcttgtttactgagagagactgtctgatccttgcgtaatgaaaccataattaactcccttcaaaggtagaatgaaacaacaatatcacttgcatataaatacaaattataaatcatcatatcatgatgaagtagttcggcaagtctatttttatcaacttacttcaagagattgtaaacatattgaaataaaagaaatttttatagataaacacaattaaaacttaagttaaaaacaaaaaataccgcattaacctaattattttaaattaaagtaaaatagatcacattatgattgacatgataaaatagaaacttcatgatgagaaaacaggttttagcttaaacattcacagtatgtgacgttatgttcaacacggcttagcttatacccagataaatgcacttaaaaaactaattagtacggataataaagaataatgaatagtttgattggctcttctgtttatcgtcgccaactcacttgtggcacattaagcgtaacgccaaattgctcattagaacatcttgatgaactttttgatattgcggaaagacgcaaccctaagcgcgcttttttgtttgtcagtaaagtattagggcgccatattcctgtttcacctaagaaaatgcgtgaaacttatcaacaaatggccaaacaatttcctcaatcactcgaaggccctattctttttattggtatggcagaaactgcggtcggtttaggtgcggggatttttgatgaagtaagagatcgctatcctcaagccctctaccttacttcaacgcgccatcctattgctgatggtgaattattctgtaaatttaaagaaaatcacagtcatgcaactgatcacctactttatttgcctcataacctagaacaacgccaatggatccagcaagcgaaaaccattgtgttaattgatgatgaagcaaccacaggtaatacctttcttaacttgctgtctgcattacgtgaagaaggcaagttaacacaaattaagcagattattgctgtcacattaaccgattggagtggtgatgctctgcaaaagcgttcaccattacccataacaaccttctctttagtgcagggaaaatggcaatggcaagccaatcccgatgcaccattacctgttatgccaaatgtcaatattactgcttcaggacaggttgctatcacaggaaaacaaagctggggacgcttaggcatgacaacccctgctaatgatcttggcctatttattcatgtttctgagggtgaaaaaatattggttttaggctctggtgaatttgtctgggaaccctttttattagcagaacgcttagaaaaacaaggggctattgtaaaatatagctcgacgactcgctcacctattgccactaattttgctatccaatcagcgataacttttactgacaattacggattaggcattcctaactttgtctataacgtggctcatcagcaatttgatcgcattctgctttgttgtgaaacccctgccgaaagtattgatagtcaacttattaaggctctctataaagttgcccctattgttgaagtaattagctatgactaaccctgttattttagccgatcttgacgataccttatttcaaactcgtcgcaaaatggtggatgagttagcgcttgcaccctataaaactggtgcgttggatagaagtttagcgccacgtagctttatgactcaagagcaagctatgctggttgattggatgctagaacatgctgatttaattccagtcacagcacgtggaacggaagaaatgagccgtgtcactattccttttcattcatgggctattaccacacacggtgctgttgtcttaaccccagaaaaagtcgcagatgaacaatggcaacaccatatcacacaaagcttaacaccttataagcaacctttacttaggttacagcaatctattacccaattaatggctgaacgtaatattgatggttgggcgagaattaactatgaatatgatgatttacccatttatttagtgatgaagcataacgatagcgctcgattagatgagctatatgctatcggtgatgagatagaaaaaatattctcaaccaaaggtttttatattcatcgtaacagtaacaatattgcttggttacctgagccaattgaaaaaggtaaagccgtcacttatttgcttaataaattaaaagcagaacgtggcgtttttcctgtgattggtttcggcgatagcctaagtgatcatcgctttatgaaattatgcaattggtatgctattccccgccaaagccaattcgcgaatgcgatcaacacaaaaatttttggagaataaacatgatggatcatcagcctttttcaggctcttatctactgggtgatgttgattttttactgcaacccgtcaagattgaaatgacacctgttgagttaaaagaagaacttatacagtctggtaaacgtcactattctgatatgttaagccaagagccagaacccacaacctggcatcttgaactgtttgaaaaagcactggctgctggcgcaacacgtttagcaacacaagtaattatgctagcaaaatcacttattgcgcattttggtgacacccctattattctgacaagtcttgtgcgtgcgggtgttccacttggcgtgatgttacaacagaccttgcgcaaaatgggaaaaacgtcttatcactatggtattagcattattcgtgataggggtattgataacgaagcgctttcatggattgagcaacgccatgggacagaaggtattgtatttgttgatgggtggacaggaaaaggcgctatcacaaatgagttaattcgttcattggcgggacgtgaaggttttcctgcacaaccccatcttgtcgtccttgctgatccttgtggttgcgcttggttaagtgccagtgatgaagattggctaatcccttttgggattatgggagcgcccgtttcaggattaatttcacgttcaatttggacagagcaaggcttccatggttttgtcgattgccaacatttaaaacaatatgaatgtagtcgctatcttgttgatactgtgggaaaaatagttgacgccttaatagataacgatattccactcgccacatttaaacatcaaccgtcagacttaaaaaaactgagcgaaaatgtcgttagtttacttgccaacaaatatgacatttcaaatatcaatcgtataaaacccggtattgctgaagcaactcgcgccgttttacgccgtgtacctgagcatattctggtaaaagaaattgcagatcctgatgttgcattactgatttatcttgctaaacaaaaaaatattactgtaaccgaggcaggtaaagcattaggacaatatcgtgccgttactatcattaaaaaggtgcaataatgattgaacgattatccccttggaatttaggggcaacgctgtatatgcccgcaacacgaaccgatatcgccgcaacaattattgatcaaaaaattgatggattacgttcattaattatttgtttagaagatgccgtcagtgatactgatattccacaagcattacaaaatctagcaacattattaaccacattatcagactataaaaagcatcatgattgtactgaatggccgttgctatttatacgcccccgccatacagaaatggcgcaatggctggttgagcatgtagatttaaccgtgattgacggcttagtattacctaaatttacccaagcttcattacccctttggtggcgtatcatcaaacccacccatttatgtatgatgccaacattggaaacagaagaagtgttcgacgttcttcaaatgacctcactggcagacttgctactagcccacccttgccataagagaattattgccttacgtatcggtggaaatgatttaatgaatgttatttctcttagacgtaatcgccatttaacactctatgatggacctatgggatacgtgataaaaatgttggttgctgtatttggtgctcgtcagtttgcgcttaccgctcctgtttgtgagcatattgatgatcaacaaattatggatagagaattagccctcgatattgccaatggtttagtgggcaaaaccgctattcatcccaagcagatagacaaaatagaacaggcattaatggtatctcagtctgatcattccgatgcgttgcgcatcttaaattcaacacaagccgtatttaaatctcatggtgccatgtgtgaaccggcaacacatcgccgttgggcattaagtattttaactagagcaaaactgtatggcattattcccaattcaaaaaatagtgttcaacgatttaatacaccataagtttaaatattcgtttttatatttactataagcatttttttatttattaatattttaaacttagtctctagttaaagaataatatctttaactagaactcctatttataaaactttaacatattatttaacaatatttttatttcggttgttattttataaaatctttaatatttgacattatttcagatatacttgtagaaaaataatacagacacaataaaagctgggtctaatttcttaacacacaattgacagatacgtggtaaccaaacatgcaattgagctctcgccaaatcagagtttttaagctggctatacttttaagtacagggaaaaaagtccccacgattaagattatttctgctcttgaatgctcggagccaacgctcacccgtgttttaaaagaaataagagagtcttatagtgctgaaattaagtacagtaaatcatccagatcgtatcaaatgactgaacgaggtcagcttgataataaaacattacgtcgtatgcgagaggcattatcttcgaatgaagaactacaacatagtggcacaacgagtcgtgtttatttagataaagataagaaaaaatcagtatcactatctttaaaaatgtcagcactacggaaaatagataaactttcgtttttaagaagtacaacccgaagtcagacggttgagtttcttgttgataattatgtagaacatttaattcaagttgctctccaagataaaaaataaatagggtaattatatgaaataacttggtatttaatatcgagttatttcattgatatttttcaataaccctgtacggataattgtcattccccctaatggtaaaataatgtttatacgttatttattttattcatttaatgtgattgattaaatccgttatgtttcacattttctaatctgaattgtataaccacttttaaatctttagccggtttacctgattcgtatcgccaatgcttcatcgccagtgaaacagagggagcaaatatcgctgcaataggatcatctgatatcctaatattttgtacattaccatttttatccacatcaaacctaacctctacatcgccttcaatattagcggttttagcgcctgtaggataataaggaaattgtcgtgatactattttcggtttttcgacagaaactacagtagcttctttttgcatatccaaaggtatcgtttttattgcatgagcaacaaacccacttaataaaagaataccgccaaatacccccaaaagaataaattttattttcataattgttatcagagtaatttttaagacattaataattctaatgataatttgctaacttaaaaagagtatagcgattttaaaaaaatactctatatattaaaattcaagattacgaataaaacgataatccgcagacgacttcttaagtcgatagagactagcagggcgtcccttctcagcacgtttttctccggtatcaattaataagtcggcttgttcaatccttcgtctaaaagattttttctggatctctttacctatcaatatctcatgcacatgctgtaattcaggcaaagtaaacacttcaggtaacgcaaatcctggcacaatagaataaagcgatttttgctttaatcgctctctcgcttgcgcaatcagttcattatgatcaaatgccagatttttctgtgctacttcatcaataggtaaccacatcacatgatccacactatcaatatgcgctttacatgcttggtgagcaattaacgccgtgtaacatacagtaacagaccaacctcttacatcgcgctgattatttcccactgagcagagttgttcaatgtacggcgggatcacccctgttttctcttttaattttctaagcacagtatcttctaggcagttgtcttgtgtttcatcaacaaagccaccaggtaatccccattttcctttttcaggatgattagctctttccaccaagagcacttttaactgcccttcatggtaagtgaatagtactgaatcaacagtaataagcggcgataaaaaatcacggcgattgtaatttgctaaaaaattttgttcgttcatggtctgcactttgtaaaaagataatgagtttattttaatgttaaacacatgaaaatcaaattttgtcataaagacactaaatgacttgacaccaatagtgtccataagacaatatactgttaatgtcataaggacactaactggagaacactatgtttaacttaaattatttcaaagcagactcatcaacatttattattaaatcggtcaacgggaaagtgcgccaacaaggtaaaggcttaagtttttggtataattcggcgacaacatctattgcagcactgccgttaaatgcacaagaagccccttttatctttaacttccaaactgctgattttcaggcactacgtattcaaggacaaatttcattccaagtcacatcacctgaaaaagctgctgaagtcctcaactttaatttaagtaagaatggcaaatcttacgccagtgaagatcccctaaagctcaacgatcgcgtggtgcgtattgctcaaaccctgatccaagccaagatccaaagcacccctttacgagaagcactacaacttagccaatccttggttactttagtgatgaaacaacttactgaacacccttcattagaggccttaggtattactattttagatgtttctattgcggccatctcaccctctcccgaaacgcttaaagcattagaagctgaggcgcgggaatccttactcaaagaggctgatgatgcaatttatgcacgtcgtaaattctcagtagagcaagagcgcaccattaaagaagctgaattagaaacagacctatctatacagcgtaaacgacaagaaattgaagaagctcgtttagaaaatgaacgtaccctattacgtgaacaagccgaaatagaaaaagagcgtcttgaagccaaagtcaatgccgaagcaaaacgtaaagaattagtcgcgttaagtgcggaaaatcaacgcatacaatctgatgctgatgcttatgctattgaagcaactatgcgagcttaccgtgagttgcccgttgaaaatctcaaagcaatggctctagcaaaaatggactcacaacaattaatggcaatggcatttgaaactttagcgcttaattcaggaaaaattggtgaattaaatatcactcctgatttatttaggcaatttatgaaaaaaagaggataacctatgaaaaataataccgattttcgtttcatattagtgatgcgaaaaagtcgcctacaagaattaattgagcgttttaacacttggtcacaagccaaattctatttagaacataaccatgttgaggtaacagattatcttaatgaacataatctctatcaaaaacaactcacagaagctgagcttattttaaaatcatttggacgttttcagctcttggaaagaggattattgcctagttatcaattttcctctcatgatattgtagtggtaataggtcaagatggcctcgtcgctaatactctgaaatatcttaatcaacaacccgttattgctatcaatccagacccttcaagatgggatggtaagctcttgccctttgaaatagggcaattgaaagagattataattaatacaataaatcacaaaatgccttttaattcggtcacttttgcacaagcaaaaaccaatgatggtcaatcactgttagcggttaatgacttatttattggccctaaaagccacacttccgcacgttatatcttacaatggggagactctcaagaagtgcaatcctcatcaggcattattgtatcaacgggacttggctctacagggtggtttcaatctattcttgctggagccatggccatcaccggaaaagcatcacaccctcttttacaagggtttagctggagtgataaaaaattacaatttagtgtaagagagccatttcctagtagaacaacaggcaccgctttaacttttggcacgattgagccggactctccattgcaattaggatctttaatgcccgaaaatggtgttattttctcagacggcattgaagaggattatttacattttaatgctggctgtattgtgcaaatcaatatcgcagatagacaagggcaactcatcgcccctaaggggcgtcagcctatttaatgatgattatttagcactgtttctagccctgaaatcatcacatcgagcacaaaaaggaatgcagcttcaccattatcactatccataatatcaatagcttgcgttaataatggtgggtagtttatctctatttttggcactttttctcgctctttttggctctcttgatgttcttgggtttcaagcactgaaccaagtgtaaaatgcgcgatggaacttaatgcataaacagcttgcgttaacgtaaagccagcatcgcacaaaaattgcaattgttgctctgatgtctcaaattgattggctgatggtcgtgtgcctgcatggatctttccaccatcacgatacattaatagcgcctgacgaaaacttattgcgttattacgcaaaaaatcctgccaactttcattcgctaatggcaaaacatgatgatgatgcttttgtaaaatagtctcagctaaagcatctaataacgcacgtttattctttacatgccaataaagtgtcggttgctctactcctaatttttgcgccaacttacgtgttgttaacccttccataccgacttcatttaataaaatcaatgcgttatcaataacctgttctttatctaattttgccatttgcgtcctcataataaaatattcttgacaatctatcactgatagagatatttttcacctctctatcagtgatagatttttaggatatttatgaataaattaattattatcatactgcttgtcacagtattagatgccattggtattggccttatcatgccagtactaccaacactattaaacgagtttgtgagcgaaaacagactcgccaatcattacggtatattattagcactctatgcgacgatgcaggtgatcttcgcacctattttaggaaaattatcagataaatatggcagaaaacctattttattattttcgctattgggtgcggcattagattacctattaatggcttgctctacctcattatggatgctctacattggacgcattattgcgggtataacaggagccactggtgcagtatgcgcatcagcaatgactgatgttactcattctcatgaaagaacacgctatttcggttttttgggtggtgcatttggtgtgggtttaattattggccccatgttagggggattactgggtgagatcagcgcccatacgccatttatctttgcggctatttctcattcgttattatttatattttcattactttgtttccaagaaactcaaaccacaaaaatatcgactgaaatatccgcattaaatcaggaaacagcgcctcactctgccactggttttattaaaaagagtctctgtttttggcttattgcctattttattattcaactaatagggcaaattccggccaccatttgggtgctattcacacaagtgcgtttcgcttggcacactactgaagtaggtttatctcttgcatttcttggcgtattacatattttttttcaagcggttctcgcaggaaaactggcgcaaaaatggggagaacgcaacacggttatcattagcatgtcaattgatgcatttggttgcttattattagcctggataagccatgtttgggttatgctccccgctttaatctgtttagctgcgggaggaatgggacaacctgctttacaaggatatttatcaaaatctgttgatcatcatgttcaaggacaattacaaggaacgttagtcagtctaacgaatataactgggattgtcggcccgttactcttctcttttatttatagttacagcgttgaatattgggatggcttattgtggtttattggtgcaatgctttacagtgggttacttgtagccagttattttaaacagaaatcaccaatattaaaaaaatttccctcataacatacttgtcattaaacaggttgaagatcaagactggcttccttgcagacttgatcttcatttatcgtgataaacgttccttgtctccacgtcgcgcagtctcgatactcatcttgagcaacccaatttacgctacttgcaatccataccaatcaatagcgctattggatatcacttaattccctatgatacgaaaccacacaaatatcataaaatacaaatataacgctcaacttattgattattgataattaatcattggtcacttagtttttcttccgtgaaaatagctcatttccttttttccttagccaaatttcgacaagttgataaccggcgatccccagggcagagccgatccccataaccgcaataggatgaatacccggccataaaatcaacagagcacctgccacaacagaaaccgctgatcctaggatgatcctgccaataaatagtcgtaatgtgataacttcattagcaactagcatcttccctaatgcaataaaagcgccaacaactaccaatgatactagtgtgtgatcatattcatccatgaatatacctcgcattcgcttacagtatttagccgtaaaaagaaccctcacctcctagtatcaatcagataatctgtatggaatatgcaagatccttttgctcaaggataaatacaacgtccttttgtactatccttgcccacttccttgttaatttgtaataggttatccattacctatttttctccacatattagtcattacaacaaattaaataatatttaaattcaatacgttgtatctccacatgtaggtttaacgtgaaatcattatctataaattttgtattttatactagtaactttgttcggttattgtcggttaatggtgtttaaccgaggttaaccgaattatttttagtcaaataaacaaataaacttgtttttcatgatgaaaatcagttaacaacaaattaaaatacaaaaaaacaataatattactggtaattgtacaaacttaggctaatatagaaggtggtgatagattgataataaagagaaaataccatgcgtgttttaacaatttactgtcctgaatgtggtgaaaaagcgatgataaagaaaagtaatcgcaagcataaagagttaacagatctttactgtgcctgccgtgatccgctttgtgggcatacctttgtgctaaatcttacctttagtcatactctaagtcccagcgccaaaaaacaagatgcccttttattagcaatgataaaaaatctctcgccacagcaacgagaaaaagccttaaccttgttacaagagatataacgcttttttacttactctattttgccttgattttatgatcctgctcccattctggtaggtaaataagttaactggttcttatataaccataaatgatgtagatttaatttaatccaacagaaacattcttatatcgcttattaaagcaacatagcaattcaacaaccacagaacgcggttttgattaaaaaagccataaaatgagtcattcctttaatcagaatttgtcgaaatcttatgtaacagcattctgttacataaaatttcaatacaagtttcaaatggagtatatagatgaaaaagcttattaatcgtgttgatgatgttttatcagaacaactgcaaggttttgctaaagcccaccctgaaatcaatctccatccctcttctttttatgtcacccgtcatgatgcccccgtaaaaggtaaagtagcccttttatctggaggtggcagtggacatgagccaatgcatgccggttttgttggaaaaggcatgcttgatggggcatgtcctggtgagatctttacctcaccaaccccagataaaatgtacgattgcgcaaaagcaattgatagcggtgaaggtgtattaatgatcgttaaaaactacaccggtgacgtactcaattttgaaactgcgacagagctactacatgatgaaggtgtaaaaattgctacggtattagttgatgatgatgttgcggttaaagatagtctgtataccgccggtcgtcgtggtgtagcgaataccgtattaatggaaaaattactaggtgcggcggctgagcgtggcgatacactcgatgatttggttaagctaggtcatcaaattaataataatggtttttctattggtattgcactacaggcttgcaccgtacctgctgcaggaaaaccctcttttactctccctgaaaatgaaatggaatttggcgttgggatccacggagagccaggaatagaccgtcgcccatttacttcattaaatgataccgttgatgcaatgtttaatactctaattgaaaatggtcactatcagcgcaccattcgcagttgggatcgagtcaatggtgattggattgaagagacacaagaaaaacagccactaaaatcaggtgatcgtgttatagccctagtcaataatcttggcgccactcccctttctgaattatatggtgtttatcatcgccttgccctgtgctgtgaaaactttggtcttaacatcgaacgttcgttaattggctcttattgtacatcgctcgatatgtcggggatctcaattaccttattaaaagtagatgacgcgctacttactttgtgggatgcacccgttgctacacctgcgatgacaaaataagttttcctataacgataactaaggatcagaaaatggtattaactcatcatcaaattattctttggctacaacaatgcgctcaactttttgaacaaaacagtgactatctcaccgatcttgaccgtgaaattggcgatgctgaccacggcttaaatatgaatagaggcttcaaaaaggtagcggagaaattacctgaatttgccgataaagatattggttttatccttaaaaataccggtatgacattactgtctaatattggtggtgccagcggtcctctttttggcaccttctttattcgtgccgctaagcccaccgcatcattacaaagtctcgatgtaaatcaactttatgaaatgactaaagaaggtgttgatggcattgtcagtcgcggtaaagcacaaccaaatgataaaactatgtgtgatgtttggtggcctgtggttgatagtttaaagcatgcgaatgaccaaagtttatctatagaagatgctattgataatgcactgaaagttgcagaaaaagcggcggaggaaactattcctatgcaagcgaaaaaaggccgtgccagttatcttggtgagcgcagtataggacataaagatcccggcagtgcctctgtggtattgatcctccaagcgctgtctaatgctatccacgcataatcattcacaatataatcaagagaggtctgccatgattaatatcgtgattgtttctcatagtaaacatcttgctgagggtattgaggcgttggcgaatcaaatgcttaacccaacgcattgccgattagccattgccgcaggtgttgatgatgaagcgcaccctattggtactgacgctgttaaaattatgacggcgattgaatcgctcgccgaagctgatgccattattgttatgatggatttaggtagtgccatactcagtacagagacagcaattgaactgcttgatacagaattagcgcaaaaagtgacactatgctcagctccactggtagaaggaacattagccgctgttgtcgcagcgtcatccggagctagcttagaaaaggttctcgaagaagccaaccatgcactaacccctaaaaagatgcaattgggtgaaaacatgggtggctcagagccaaatgatgtcacgccttctattcaaatgcacggcaaagaagctcattgggtggtaaaaaatcctcatggtttacacgttagacctgcagcgacactggttgagctactgtcaaaatttcgtgctgactatcaattaattaagggagatagacgcattaatccccttagtttaaatcaactttctcttattcaaattcgtcaaggtgatgaaataaccttaattgcttcaggagaacaagaaaatgaggctattgatgcctttttagcactggctaaacaaggttttggcgaagcattaccggatgaactcacggagcaaagtttaaccggtactctcgtacccgcttcccccatcaagggaccggcttttatttggcatgagctagaattagctcctattgaaaatttatctgcaccactcgatagcacaatacaaattgagcaatttaatcaagcgataaaagatacactcaatgatttgaagcactatgctgaaaaagccaatcacacattaggtgaacaaataggcgctatttttaacggccatatcatgatgctggatgatgaagaattactcaccaatgttatcgatcgtattaaaacagataacgttagcgctcagcagagttggacgaatgaaatgaaagaacgtatccaactctaccgtactctcagtgatccttatttgagagcacgggagttagatcttcgtgatctgcgcaatcaagttctttaccatttacaacagaaaacgcctcctaaatttaccccatcacaaccctctattttagtggctaaagagttattcccctcgacattaattcagtttgatgcaactcaattattagccattaccttagctgaaggggatagttgttctcacagtgccattatcgccacgcagatggggctacctatgttagttcatttaggtgatggattattaaaaataaaagaagcacaagaattaacccttgatctcaagagtagtgaattaattattggatcaataaattaatgtgctaatgcaataagcgccaaatggcgcttattgataactatcaaaccttaggtttataactctctttatccagttcatgctttttcatgcgtaaatagagttttttacgtgggatacctaaataatcagccacatcgctcacacggccagcaaataaatagagtgcatcttcaattaagcgacgctcataatcatcaactaagttatctaaaggcccttcaggggggataatggcacgatgttgctcactatcaaccattttcacaataccaacagcatagagttcagcgacattccgtagctcacgaatgtttccaggccaatcataacgttttaatatatcgagataattacgatcaatttttggtacggcgatcccaagccgctgagcactttgccgtaaaaaggctctaaatagaggaataatatccgggcgtcttgcgcttaatggtggcaaagaaaaagttatttgcgaaaagtagtaatagaactcaggtatcaatcgcccttcagtgactaattgctgggtattattttctaaaatcgcgatcgttctaaattggcgcttaccctgcctttccatatctaataggtaagcacttaaccaacgttgtgcaccagaaggtaaatcataaggggagcgtaaaataagtgtgccgacttcctcttgctctatttgagcaatcagtggcttaatatctactaaattttgacaatctaccgtagtcaccgctttatcgctgtgaggacttaattcatgtaataactgagcgagtagatgtcgccctgtccccatctcaccttcaatcattaagtctttatcaatatcagcaatttgctgtacttgctgtctaatggcggtaatttgtgcactatcgccaactagacgctcttgagtggtggtgatcatcgtttttctaagtgaaagaagtgattttcgctctttatgcgctttagcaactaactctaaaaatagcggtggattaatgggcttttcaataaaatcataagcgccttttttaacggcctctacagcaaggggtatatcaccgtggccggtgatcataatcaccggaatacgaggatcaatttgttgaatacgcgctaagacttccatgccattcatcgcaggcatgtaaatatctaacactaccgcaccttcatattctggtgtcagcagactcaatgctttttctggcgaatcagtcactctggcaaccattccggcaagattaagcaaatgacgataagattcgagaatatcctcatcatcatcaattaatagtacatcaatatcagacagcagtgactgtgtcatgagtaaactccaaaacaaccatcgcaccgccatttaatgccgatgctaagtaaatttcataaccaaaccgttgcataatagaacggcaaatcgatagccctaaccctagcccaacatctttggtggtggtaaaaggggtgaataattttggtaaaacatcagcattaaatcctttgccactatcggtaatggccactcgttgatatttagcttcatccgataataggtcgacgctgatctgactttcgcccattcctgcgactgcatccattgcattaacaaacaggttaactaagacctgctctatttgtgttggatcagcacaaatattcagttcactggggatattattgataatggtgcactgctctcgtttagagcgcgattccactaataccatggcactttccaccagcccttgtaacggcgctgaaacatagctaacttcagatgaggattttttagaaaaattacgtaatgccgtaatgatcctattcatacgagcacataatttttcaatacgctcaatgggatcaggaagttggtcatatttctccatctgtagtgttaatttaacgctatataagtaggtattaatggctgaaagcggttgatttaattcatgagcaagactggtcattgcctgtcctactactgccattttggccgcttgcactaactcttcttgtgtctgaattaagtgtttttgtgcttgttcacgacgcacaatctcttcatttaattgttggttcttttcttgtaaatcttgggtttttaatgccacaagatgttttaattctaatcgacttaattcttggcgagtaatatccgtgatcgtcacaatatatttatgctcgtctttatgaggatattcgcgaatattaaattgcagaaaatgaggctttccttgttttaccatgctcacaatagactcactttgcccaaacaaataaagcggacttgtgggactaaactgcgctcttaatatcgtattggcttcaccactaaataataaccataatggtttattgctctgttcatgaccaatacctaataaagtagcagcactgggattgacggtttccatacgtccatcatgatgacaagtaattaaactggcatcggtattattaatcagattcagggcattcgtggcttcaacttctttcatttgacgccaaaagcgccgcaaacggcgacttaataatccaatttcatcttgcccttcaattaatacaggctctgttaaatgacctttagcaacatgggcgagatcatcactcaacttatttaatctagcaatcagtcgcctatctattaagattttcatgacaataatgctgagcaatagtgaagcaacgacaattaagataatgacaatttttcccgttgccatcagttgtcgcgtattatcattgagcttattcaatgcttcactggtggcaagcacattacttcttactgcattatcaaactgagataatttttcatttaatttaggagtaagtgctttaagttttttttcggtttcgacatcatcaatcaatgtttgatagatatcaccgtcaaaacgagtgatcgcaataatttcttgcaatacttggcgatgagcaatggtagaaggatagctttttaatttttgatttaaagcgataatttcatcaattttgacacttatatagtgaaatgcgacatcaatatcacggctatagcgttgatgtgcaatttcttccactaagctaattaattcattttctgtagtgaataactcttgaagtaacgttgattctaaaagcagttgtaagctattttcctgtacatttttttcattaagcatttggctgacatgccactcaatttcattaagtagaggcttaatatcttcacctaccgcatcatgcatccaagccaattgacctaaaagctgtgctaacctattttcgagttcacgacgtttatctaataaaatatcttgctgctcaattaagtttgataagtcatccactaattgattataaaaagtgcgttgtgattgttgctcaatcggaaactcgcgcagattatctaatagttgataaatctgctgtttttgttgttctgaaactgatttacgttgtgtttgttcacgctcttttaatagcatctgtaaattagtgctgtaacgctccatattatagctggtggttaacataggtaaggagtcaccaacagacgcattgatttgagtggctaattttccccacataaaaaatatcaccccaccaatcaataaagtgagtaacgaactaaagataaacgccaaataaaggcgtctaccgagtttgcccgattgcttaggcattaatatctgcatccatcatacctttcaaaaaaacagtattttcaactgtatatctgaaccacaaggcggttagggagatttagtttctttcaataaaactaatgcttgttcaagtttttccgcttctaatgtacgccattggtacaatacggctaacgcttgatctgaatattcccgctgatcggcttctttcataaataaggcttgtaatgtcggtgaattagcttctttttcgctaattagtactgaactggctatttttcgggcttgattggttgctgcgatccgttctggtgatcgattttgttgtttttctgcctcgtggatctcattccaaacttggcgcattaatggaaaattatgggtgatcatttgatcaaaaagaacattgaccacttcgctacggcgataagcttcattactgtttaaaataaactcagtattattagcaagctcatcattattacgtaaaatttctttgctgagggggatcttcgccatatcacttttatagataatctcttgtccttcatccgataaaagaaaggcgataaatttggccgcagtatctcttttactgctttcagccacaatagcgacataagcaggtaaaataattgatttatcaaaataactaaaatcaacaaaatcaaagcgtttttggtggttaaaagcgtaattatcaataataggccccgcccccacaatacctctggcaatagcgtcactcactcgtgaactacgtgccgatatcgaagaaaggttaccactggtttctagtaaaatttgccatccgcgctcccaaccatattcttgcagcacattttcaaccatcagttgcatcgtgccagagttggctggtgtcgtcatagttaagtgcccttggtaaatcggatcacttaaatcaatccaacttttaggtgccggaatacctaacttttgcaagtattgtctgttactcatgatcccaatacctgaataacccaccgtggttattttgtcatttaagatatcactatgacgagttagccattttggtgtttcatagttaatcggtaagcgcgcgagtagtccttctctatctaaatgatgaaaaaaattagccgaagaggacatcactatatcaacaggttgcgtaggatactgcttcatcatccgtgtagcgatcgcaacacgccgataaaccacttgtaccttagtttcaggataacgagcactaaaagcttcggtaagtggtcgcataggtgtatctgaaagtgtcgtcagtataaccaatggctgctcatcactttttgctggagtgataaacagccaactaaataatagtatgaggctaaagattatttttattctcatgacatacccctgattttgtgttgaataaacctaaaaatgtgttgagcatcaaatttctgatatttagcaatatttattattttcagtgaatgagtccttaatgacccattttcgatgatgatacgacgatatattcactcatttttagtccaacacctaatagcaatgttacaaatttgactcaccgattcagcagaatgtgtcagctctgactcaaattagcgcttttgccctctgatggcctaaatgaatagcatctgccctgaaaaacaaaatcagcttcaggcatgaataatattcggagtcatctctatgttaagtttctttaaaaccagaaaggatctgccgctaatcgaagcgtccaatgaaaagatccgctcaatatataaaaaatatcagtggcaggtttttcttgggctagtactaggttatgccatgttctatgtggtacgtatggcacttggtgtcgttaaaaagccgatgctagatgccggtattgtgaccactgcagaactgggtttaatggggtcggcgttcttctttacctatgcctttggtaagttttccaatggcttcttgtcggattatgccaatattggccgctttatgtccatctcgctgattgcgtcctcttttgtttgtatctttatgggaatgtcgactgcgagcctattcttcatcttattgtggggaattaatggttggttccaatcggtaggatctgccccttcttgtgtgtctattttccaatggttttctccgaaacagcgcggtacagtctattctatctggggtggctcacgtaatatcggtgaagcaatcacttggatattaactgcgaccatagtgagtttctttggctggcgtgccggttttatcggtgcaggtatcgcgggtattgcagcaggtatcatcttactgatgatcttaaaagatcgtcctcgtacttatggtctacctgatcctgccagtgcatatggtgaagagtcagaagccgttaaatcaagtgatccaaaagaaactcgccgtgctcaattatttgtcctaaaacaacctaccgtatggatcatcgctgcagcttgcgctgctatgtatatctcacgctacgcaatcagttcatgggcggtgctttatctgcaaggctcaaaaggctattcactgattgatgctggctttgctatgtcaacttaccctattgcgggcttctttggcgccatcttagccggtatggcatctgacaaactatttaatgccaatcgtcatatcccaacacttatttatggtatcgccaatattgccggtttcgccctcatgttctggggaccacaaagccgtgttatggatgccattgcattaagtatgattggttttgctatgggcggactggtggtgttcttggcgggcttaacggcttgcgacctgatgccaaaaaacgcagtaggtgcagtaaaaggctttatcggactttttgcttatattgccgcatccgctcaagagcttgtttctgcctcgctgatcaaagtcacgcaagtcggtgatatcactcactatgatttcacaacggtacagtatttctggattggttctgccatcgtgtccatgatcttagctacgctggtctggaatgcgaaaaaagtcaccatggattaataaattaagttgttatcaagggatacttttcagtatccctctttaaaaaagagaatgtcactatgcgtaagacaaaaattgttgcgactcttggccctgctagttgctcagaacagatgattgaaaaactgattttagctggcgctaatgtatttcgtttaaatttttcacatggtactcgcgaacagcatcagtccacagccgcaactatccgtcaggtcgcaaaaaaacatcgtgtatttatcggcattttagctgatctgcaaggccctaagatccgtatagcgagttttaaaaataatgctattcaattaacacaaggggatagttttatcctcaatgcagatttagacagcacacaaggcgatgaacaacaagtggggttagattacccacaacttgtacaagaagtcacaccagggaatattctgttacttgacgacggtaatatccaattaaaagtccgtgcagtaaataataataatattgagacagtggtcactgtcggtggaaaattatctaaccgtaagggaattaatttactcggcggcggtttatccgcaccagccttaacggacaaagataagcaagacatacacacagcagccgctattcaagcagattatatagccgtttctttccctcgtaatggtgcagatattgaatatgcccgtcgtttaattgttgctgctggcagtcaggcaaaaattgttgccaaagtagagcgtgcagaagtcgtttcatgtcaagccaatatggatgacattattcaagcatcggatgtcattatggtagcgcgaggggacttggcggttgaaattggcgatgcctgtcttcctggtgcacaaaaacagttaattgctcgttgccgtgctctaggctgcccggttattacagccacccaaatgatggagtccatgattgaaaatcccatgcctacccgtgcggaggtgatggatatcgctaatgcagtaggtgatggcacagatgcggtgatgctttctgcagaaacagctgcaggtaaatatcctgaagaagccgttcgtgcaatggctcgtgttgcagaaggtgcagagcgctcttttgccgccaatgccgaaaacccatggcaatccccttcttactattcacaaacaggccgttggattgctttagcggcgaccacagcagcttttcataatgataaacatctgagcgttgctgctttaactgacaatggtcaatcagtcacgcttctatcgcgctttatgccaaataacaatatctatgcattaacagataaccctgcacttgctggtcagttgactgtattacgtggtgtaacgcctgtcacttatcaacgtcaaaataataatgatggtgatgaaaacatcatgcaaaaactgcaaacagaaggattattaacagatattcattcactcttaatcacccgtttatcgacctttgaaaaaaccggtgaaagtgactgttgtcatctggttccggtaaaacaagttacaacagctttaacttaattgtctgttatcaaatagcttatgagagaggcaacctgaagaggccaataacaagaaaaacagtatagccaattattttagccacatggaacgtggctatttttctttttaatgcacctaaccatcattatctattaaaaaatagtgctcctagctgttgtttttttcgacagcatcccaatattaattcctatattcactgtattaataggagaatatgatggcaagtggatgggcaaatgatagtgctgttcaagaacaaattgatgccactattgatgatgccattgcaagagcgcgtaaccaaatgactcagggagaaagtgctgagttttgtgatgagtgtggtgaagcaattccattagctcggcaaaaagcgattcgaggggttcgctattgtattaactgccaagaagcgatagataaaaaatataatacctttagtggctataatcgccgtggtagtaaagatagccaactcagataatgagcacacttcttatacaaaaaactgtaccttatgtaagcttactcaatcaaggtacagtttattttattcaatcaactcacgagttaaattttgctgactttcttagcacttaaactatggctcatttcagtaattatctttaagaaattatcaatatgggaacgttccgtattcgggttcataaagacagctttttcccccggaatataaacatagcgattattttttgcatacttagagcaagcaatagaatcaacccagttggtaaataatccctttttaccccgttgtaagaataattttctatgccattgtgcattatgtaccataaagtcataggcttctttatctgtcgcacaggttgattctagatcaaaggcaacattaggatcagagactaagtttggatcatataatttaaacccaacacttgggccttggttttgaggcactatgactttggcattccccatagcaagtaattgatggcgcatatagttcgcgttttgtaggcaatgggcaatgatggtttgatagccttcaatccccatataatgcattgcagaataagccccaaaaataccaaccccactacgtgtacattcaatagttgattgtaaatgggtttgaccttctaattcatgttcaaagtaagtgaagttttccggatcattttcaagggcaacaaagtcattaccatttttcactaacactaaacttgaggtataaggtacatatccccacttatggaaatcgatagtaattgaatcagcatattttagatgtttaaatttcgccacattttggcgtaaaccttctaaagtaatatcgttgatagccagagggttgctattaaaatcataatctaagaagaaaataattggccaacctactgctgcatcgacgtgaatatgtggtttaaccgcgatttcaaattcttcacacagacgatctcttaattcgcaaacgcctttaacatcatcaacgccaaaggtgtccgtcgtccctgtcgtcagcataatagttggtactttacacttaacagtaaaacaagctcttaattcacgctctaagtgttctaaattaatcgtattatcttcggacaccttaatgcggatagtcttgttattaacatcaacccctaatagcgccaagttggtcatattagaataatgacccccttgagagttaataatacgataatcctgatcggctgccatgcctaaatgtttagaattaggcattgatttacgtaaaccaaatagataaccatataagttacacatggtgccaccctgggtgaaaaccccagaggcaacttcgggatcgtaccctactaatttagctacttttttaatggtgactttttctaaaacatcagcaacaccagagtattcacaataaaccatattaggattgcccattaatcctaatattgagccataaacacccggatcgcttggcatcgcaatgacattttcaaccgctaatggattttcccagtttttgcataacgtcgacactaacatgagtaactcgttaggatcattctctggataattaatatgttgctggatctgcccatcagccattaaacggtcaaataacgcctgcccattctcataacgctgtaattgatccttatcattcgtcatggtctttctaaactgtgtaatagactgaatggttttatcctgaaatatcggccaatactgcggatcacggctgaaaaagtgagcaataacatcacggtacttcttctcaaattcagcatttagaatgttagcagaagataaacccaacaaatcttgatttttcactatattctccaaataaaaaccgacaatagcttaaataaactgaatagcaatactatacattttcttattaaaatagttagtgatctatatataacagttgttatttaaatagttaactaataatttattttatttaaaacatatcaataagatagggataaatggcaagctatattgacagtcatcgcactcctacccttgcttttatgtgactgacatcacaataaaaacaggctcactattagcattatcgtcggaattaactgtaataatttgatatataatgaaaaaatattaaaaccaaataacttattgaaattattagaatagatatttaattaaattaattaatctatttttaatgaaattaatgcaattaaaattgcatttaatgtaactacaacactcaaaataagaacaaaaaaccatattatgctttattgatagataatttattttttacttaacttttatgtgacattaaatattaaaataatagttaatgatgctaaagaggcttaataaaaacaatcaagtcaataacattagttatttatactaaaaataattaaaaaattagcataagttaaaaacttaatatattaaactgttaggtcaaatagtattgctaagcgatgataacgaactttaccaataaactaataataatgatgatacagctgaaatagctgatagaagattgagtaggaaaatcaaattgagatggggattaatacataaagcgggaaaagtactccttcccgctttattaattagaattcgaccttaatgtacaaaaattaaaacagtcccaataatgtgccaacacctagggtaaagaagctaaatagccaaatccaaccaaatgagtaacgtaaatgtttacccatatcagtgccagcaagccccatagcaagccaagcggctggtgagaatggacttacaaaggttccggcattattacctatggccatagcatacacaacatcagcaacatggacaccaccactagcagtgacctcctgcacaataggcaatagtgcaaaataataagcatcagtgctggtaaagatatccatgggaacacctaatatacctacaacaatatgcaaattatcgacccaatgagaaggtaatactgctgctaaatcaagggcaatagcttccagcatcttcccattagacatgatgcctaaaaaagcacctgccgctaaaataattgctaccatagagagtgcttgaggagcatgatgattaattatcgctatttgatcttttggcttaggatagttgatcactagagcggctgataatgcaaccataaaaatataaggtgccgaaaataatcctaaggctaaacacgtaattgagccgataattaacagaaggttgatccaaaatttttgtggtttttctgttcctgtttctggctgatcttcatcaaattgtcttaataaagaatcttgctcataaggcgtagtcccttttagttttgctttagcaatacgtttggtttctcgcacccccataaccgcggcaaaaagcatcgagccaaaaataccaattatctgtactgggatgatcttttgccacaattccgcagccgaaataccggttacagccgaggctctacctaaaggccctccccaaggtaccatattcatcacccccatactggtgcacataattagcaacataagataagggctcatacctaaacggcgatatagcggtaaaaaagcaggaataataattaagaatgtcgccgcacccgaaccatctaaatgtacaacagccgcgactaacgctgtgacaatacacactataatgacattgccacgggtgatactgatcatcatacggatcagagggttaaaaatatgcagatctttcattatgctaaaaaaaagtatcgcaaataaaaacatcgttgcgacactactcacctttttaatacctaattcaaaaaaagtagatatttcagtaaatgaataacctgcgacaagcgcaccaattaatggtatgaccgacattgcaataattgggcttgttttccccatcattagtaatgtcacaatagaaataataatgagtaatccgataatcgttagcacatgaggatccttgtagtcgttattatatttgcactttatgttacaaaaatgataaccactcatgtaaaaacagtttcaatgatgtgaagttaatcaccgattattttctatataaatatacttagtaaaaatcctaattatattaaataaagttaaaaatcaaatgaataaaaagaaaaatagacataaaaaaacccaatgcaacattgggtttcaattcaatttaagcaacgaaatgtatcaattagtcttctaataacagaacagattctaatgcaatttcaatcatttcattaaaggtagtttggcgctcttctgaggttgtttgtgtacctttcttaatgtgatcagaaacagtacaaattgtcagggcacgtgcaccatattccgcagctacaccataaatacctgctgcttccatttcaacacctaagatgccgtatttttccatcacatcaaacatttctggatcaggcgagtagaaaagatccgctgagaaaatattacccacacgaactttaatatcttttgctttcgcagcagagacagcattttgtactaattcaaaatcagcaatagccgcaaaatcttggtctttaaagcgtaagcggttaactttagaatctgtacatgctcccataccgatcacaacatcacgtaattcaacatctggtaataccgcaccacatgaacccacgcgaataatcacttttacaccaaaatcagtaattagctctttagcataaattgagcaggaaggaatacccataccgtggcccattacagaaattttacggcctttatacgtaccagtaaaacctaacatgccacgaacattatttacttgacgtacgtcttgtaaaaaagtttcagcaatgtatttagcacgaagcgggtcgcccggcattaaaacgacatcagcaaaatcgcccatttctgcgttaatatgaggggtagccataattcttccttttaatattgatctttcactattcaaatataattcggtagacatattgctatgcctaccgaagtaaaattaaaacattgctttaccgtattctactggtgataaaccgaagtatttcacaacagtttgtccgatatcagcaaaagtttcacggtgacctaatgaacctggtttaacttttggcccataaaccagaaccggaatgtgttcacgggtgtgatctgaaccttgccaagttgggtcacaaccatggtctgcggttaggatcaaaatatcatcttctttcactaattccatcagctcaggtaagcgacggtcgaataattcgagtgcttcaccataaccgacaacatcacgacggtgaccataagatgagtcgaaatcaacaaagttagtgaaaacgatagtgttatcacctgctaatttcatctcttcaatcgttgcatcgaacagagcatcaatacctgttgctttcactttcttagtaatacctacatttgcatagatatcagcaattttaccgatagagacaacgtggccttgtttttcatcaaccagttttttcaacatagttggtgctggtggctcaacagctaaatcatgacgattacctgtacgtgagaaattgcctggtttgtcgccaataaatggacgagcaatgacacgaccgatgttgtaatcacctttgtttagttcatcacgagcaatttcacatagctcatataatttatctaaaccgaaggtctcttcatgacaagcaatttggaaaacggagtcagcagaagtatagaaaataggtttcccagttttcatatgctcttcacccagttcatccagaataaccgtaccagaagcgtgacagttacctaaataacccggcaaattggcacgtttaacaatgttgtctagcaactcttgagggaaagagtttttcaaatctttaaagtatccccaatcaaataatacagggacacccgcgatttcccagtggcctgacggtgtatctttaccagaagagatctcactcgcgtagccataagcaccaataatttccgcatctttgtctaaaccaacagggaatttacctgttgattcttcagccgctttacctaaacctaaacggcaaagattaggtaggtgaagaggacctttacgaccatctttatccgctttaccttctgcaaatgcttgtgcgatatgtcctaaagtgtctgcgccttggtcaccgaatttctccgcatcaccagcagcaccgataccaaaggaatctaataccatgatatgtacacgtttcataattctctctcctgtgtcattttccgtagaccacggatatgtcacttataaatcatcattgagttcttattcgctgacttggcgatacaccattggtgacgtttcacgttttgtctcaccaattaccatcgctttacggacttctgccgcagcttcttgccatgatttttcactattggcatggatcatcgcgagtggtgtatctgtattgatttctgttcctagtgccgcgatttcacttaatccaacactgtaatcaatagcatcagttgctttacggcgaccaccgcctaaagtcacaactgacatacctaaagcacgggtatccatttctgtgacaaaaccggctttctcagcaaatacaggcttacttaataccgccgttggcaggtatttattgtagttttcaacaaaatctgtaggaccattttgggctgcaaccatacgagcaaagacttccgctgctttaccgttatccagtacatcttgcagtttttggcgagcttgttgacgtgagtcagctaaacgacctgacactaacatttctacacacagtgccatcgtaacttcaaataagcgtggattacggtattcacccgttaagaattgtactgcttcacggacttctactgcattacctgcacttgatgctaatacttcattcatatcagtcagtagtgctgtagtttggcatccggcgccatttgctacttgtacaattgattctgctagctcttccgatttctgatatgttggcataaaggcacctgagccaactttaacgtccatcactaatgcatccaaaccttcagctaattttttacctaaaatagatgcagtgataagcggaattgaatcaacggtagcagtaatatcacgtgtagcgtaaaagcgtttatcagcaggtgctaatgaattggtttgcccaataattgctacaccaacatgacgaataatatcgcggaatttttcatcatcagggaaaatatcaaagccgggaatagcctcaagcttatcaagagttccaccagtatgacctaatccacgaccagaaatcatcggaacataaccaccacaagcagcgaccattggccctaacatcagtgatgtaacatcgccaacaccgcctgttgagtgtttatcaacaataggaccatttaagtttagactcttccagtttagtacagtaccggaatcacgcatggctaatgtcaaagccacacgttcaggcatggtcatatcatgaaaataaattgtcattgcaagtgctgcaatttgaccttcagaaacagtattatctctgacgccattaatgaaaaaacggatctcttcttcagttaaaggatgaccatcacgctttttacgaataatttcttgggcaagaaacactgcaacctcctggtgttatagcattgataacgcccacccattgtagggtaggcatacttcataaatgaattaataaccactagacgatttttgttcgccatgaccgagtgtggctaataaattacctaacagacttgatgcaccaaaacggaagtggcgagcatcaacccagttatcgcccataatacggtttgctaatgcaaggtattgcgcagcttcttcagctgtacgtaccccacccgctggtttaaaaccaacttctttgccaacacccatatcgtggatcacttgaagcattaattcagcgctttccagtgttgcattaacaggcactttacctgtggatgttttgataaaatcagcacctgctttaattgagatttcagatgctttacgaatgagcgcaggatctttcaactcacccgtttcaataataactttcagtaaagcacccgctttagcgcaagcgtctttacatgctttaacgatatcaaaaccgatttgttcattacctgccattaatgcgcggtaaggaaaaacaacatcaacctcatcagcaccataagctaatgctgcattagtttcagctaatgcgatatctaaatcatcattaccatgagggaagttagttacggttgcaatacgaatttctggtgttccctgttcacgtaatactttacgagccagtggaataaagcgtgggtagatacagattgcggctgtattaccttctgggcttttcgcctgatgacatagttttgtcactttttcatcagtgtcgtcatcatttaaggtggttaaatccatcaaagacagcgcaaggcgcgctgcagcggttaaatctgtcataaaactctccaacgatgtttctcaagccctctatgggcatacgctttaaggttagcgattaattttgttggcgagcggacttggttccttgaagatgtggttgtaacaagtgctacaacgacagctgagctccctctcaccgcgctatgctcacttcggcgacccgtcattgagctttcgccattccatgaagtttcagcacatcttatttgaacacgctagagaacaattagatgtgctttctgtcacaataataaaatgaaacttgcaactaaagacattaaattgtgatcagaatcacaaaaattttattttctggtttaatgttactcgaataaagtcagtaagtcgtctttataacgtaaaaacttttacttttaatgaaatgactcattaattggctaacttctctacaagttgcgaagtaactcacatatatataaaggtagttaacattacaacagaaaacaaacaaaaagagcagataagcaattacctatctgctctgtaaatactttcttatttaagcagcaaccacagccattgcggttaatgcaaaaaagaagccggcgatggttgcactcattaagttagagagtgtacccgccaaaacagctttcatacctaagcgtgcgacatctttacgacggtttggtgccattccccctaaaccacccagtaataccgcaacagaggaaaggttagcaaatccacacagcgcaaaagagataatcacttttgtttgttcagacaaggccattaagcctgctgctgctaattgtgattcatcttgcagatatttactaaactccgagtaagcatagaattcgttgatcaccagtttttgaccaataaaagagccagcaatggttgcctcactccaaggcacaccaattaagaaggcgattggtgcaaatacccagcctaagattaattctagcgagaagtcttcataaccgaaccagccaccaattccgccaagaataccattaattaaggcaattaatgcgacaaaagcgagtagcattgcacctacgtttaacgcaagttgtaatcctgaagaagcccctgatgccgcagcatcaataatattagcgggtttttcttcatcacttaagttatcaaaagcatctttttgatcatcaggtgtttctgtttcaggaaccaagagttttgcgaagagtaaaccacctggtgccgccataaatgaagcggtgatcaaatactccaatggcacacccatacttgcataacctgccagtaccgaacctgccactgatgctaatccaccacacatcaccgcaaaaagttctgaggttgtcattctagcaatataggggcgaaccaccagtggtgcttctgtttgtccaacgaagatattggctgttgcagacattgattcagtacgagaagtgcctaatactttttgtaatccgccacctaaaatcttgatgacaaattgcatgatacctaagtaataaagtactgctatcaatgaagagaagaacacaataacaggtaaaacacgcaaagcaaaaacaaagccaccgctgccaaatagctcaaacattttgtcggaaactaagccagcaaaaaggaagctcatgccgttttcaccataatcgatgacatttttaacggcatcagaaatagccaataacactttacggccactttctgaataaagtacaaatgcgcctaaaccaatttgaataaggaatgcgccaccgaccgtgcgtaatttaattgcacgtcggttgctggagaaaagaatggctatcaatatcaatgtggccattccgaccaagctcataatgaggtgcattgaaggatccctgttcatataaaaatttaatggattatcaataagcttgttactaagtttattgactctttttttgccagataattatacctagtcccagaaaagaaccctctatatccatcacaattagcatcttaaaaaagtaacataaaagtcacaaatgagatctaaatcacactaaaaagcaaaaaacgcacttaatggataaagtttatttggaaaagtggttagcagtttaataaaaaacggtaatacgaatggcagagtaattactaatttacttaaaactaggcatcatctgttaactgaaataattgtagactattcaggtaaagttggtttgcaataacctctgctgactcttgacgcaattcacaaagagaagaaaaaacagcgagaattcgctcagggcggttaggctcgccttgaaaaccacttacaggcatatcaggcgcatccgtttctaataacaagcgctctaagggtagagaggcaattgcacgacgtgttttttgtgcacgtggataagtgatagtgccccctaccccaataaaatagccttgttgaacaaaacgttctgcttgttgcagactgccggaaaaaccatggatcacacctttacgaggaactgaataacggcgcaaaatagcacttagattatcatgagttttacgtgaatgaaggatcactggtaaatcaaattctatcgccaatttaagttgtgctattaaaaattgttgctgtttttccggatgtggatttgtcatatagttatccaaacccatctcccccattgcaacacaacgtggcgtcgtttttaggcgtgttttaagttcaatcaagtgctgctctgtatgcgcttcaatatataaaggatgcaaacctagtgcacaatatagtgcattgttataacgagacaattccgttaccgcgtcccaattccactgagcaaccgcaggaataataattttttttacctgagcctgttgtgctaaagcaaggctattctcaaggtcgtgataaaagacgggaaaatcaaaatgacaatgcgtatcaataaatcgactcattcttgaacactccttacttcagggtgcacactccgagttcttttttgaatgatttcggcatcttccgctttatctgcttttgcttcattttcaaataggctaaatatttttttatcgtgttgctgaaattttttcttagagaagtgttgaccaatagtggctagaaaatagcgcccacagcgtctaccaacatgataatcatgatttaatgcacttaaacggcttcctaatgcactagattgtagtgttgttggtggatatatttcaatgataacggcatcttcaggtggagattggataaatcttagtgtgtcagtataagtttcaatatggacttgagccatattgagaaagcgttgaaaacggccattctcaaaccattttcccattttatccacccactcggtggtatattgatattcagacggtactgttcgtataacgacaattgtacgacaaccacgacgataagcctcttttactgggatcgcatcactaataccgccatcatggtaaacaacatcttgaaataaaacaccattgcgataaaacgcggggatcgcactggaggctttcacaatatcaagccatgtgcttttttctggttgaaaataatttgccttaaaattgtcggagcgacttgccaccatataaaactcgcgaccactatcgaaacgacgtaatgctttaggcatatttaaaggcatttctttcgaagtggtttctatataccagtcaagatcgagtaaattccccccacgaacaaagcgaatcggattaaagaattggttattggtggtataacggttaatgactctgcgggcgtaacccctttgtccacaagcaaaagcagataagttttgcgcccccgcggatacccctaggagtagatcaaaaggatcaaattgagagcgcataaattcatcaagaacaccggcagtaaagatgccccgctgtccaccgccttcgcaaactaatgcaactttgccttgtggtaaggatgattgaaattcaagtgcagtaatattatttaatgtaaccggtatatacttccccatagagtctccttaatacaaccttataaggatactcgcacctgttttcaaggtcattctttttaatcactaattaaaataaattaagtcgctattaagttagccttgaatattcactgatgattcaacgctttttacaccatcaattttttcaatgatctgaatgatttgtttttcctgctctgcatttttaacaaagccggcaactgtgacatgaccaaattcagtacgaattgaaagtgatccactgtcaatggaggggttaggtaatagtgtttcttcgatttttttcgatattgccgtatcgcttaattcattgttaacattactggtagttttatcaatttcgttataccacgatgtctccgcaatagttgatgtacttatcattgtcactgtcatacccgtgactagcgctaatactaattttattttttgttgattcattgcttccccctgctcataaattaatcatgacaggaaatgtgtgtattttttatcaaattattaacaagtacttcagttacactactaagttatgagtagcaaataaagtaataaatagtaaataaagataactttttgtaattttaatctgaaaaatagccatttatatgtaaaaagtttttattttatttatacaatgagtataaaaatatcattattaggatagcaaagaatagaaagagtaatagctgattaaagggtagtttttattagaatatcgacggaatataaatagtatagataagattattgagtaaatctaaacagatactggggttgattttacaatacatcattgtgaaaaaagccataaaaaatatggctttttatatgatttataacagaaaattagtgttcacgcgtttgatggaactcaatatcaggatagcgttcacgggttaaatttaagttaaccatcgttggtgcaatataagttaagttatcaccaccatctaatgccagatgttgctcatttttacgcttaaattcttcgagtttcttttcgttactacattcaacccaacgagccgtcgatacattcactgattcataaatggcttcaacgttatactcaccttttaagcgtgcaaccacgacatcaaactgtagcaccccaactgcgccaacaattaaatcattattagctaggggtctaaacacctgtaccgcaccttcttcagataattgcaccagaccttttaacaattgtttttgttttagcggatcacgcagacgaatacggcggaataattccggagcgaagttaggaataccggtgaattttaacatttcaccttgagtaaaagtatcaccaatttgaatggtaccgtgattatgcaggccaataatatcaccaggataagcatgctcaacatgagaacgatcccctgccataaaggtcaatgcatctgaaatcaccacatcttttttcgtgcgtacttggtgcagtttcatccctttatcatacatgcctgacaccacccgtaaaaaagcaacacggtcgcggtgtttgggatccatattagcttgaattttaaagacaaaacccgtgaatgtctcttcagccgctgtcacttctcgcatatcagtttgacgaggcattggcgctggcgcccacttcaccaaaccatcaagcatgtgattaacaccaaagttacctaatgcggtaccaaagaaaaccggagtcaattcacccgctaagaaagcttcatgatcaaactcatgtgatgcacctaacaccaactctagctcatcacgtaattgaacggctaaatcatcaccaatcgcttcatctaactcaggattatccaaccctttgattactcgtgagttttggatagtatgaccttggcctgtttgataaagataggtttcatctcttaagatatggtaaacccctttaaacagttttccacagccaatcggccaagtaacaggactacaggcaatttttagctcagtttcaacttcgtccattaattccatcggatcacgaatatcacgatccaatttattcataaaggtcaaaattggcgtatcacgtaatcgagtcacttccattaatttacgggtacgatcttcgaccccttttgaagagtcaatgaccattaaacaacagtcaacggcagttaaagtacgataagtatcttcagagaagtcttcgtgccctggggtatcaagtaagttaactagacaatcagcgtaaggaaactgcataacagaagtggtaatggagataccacgttgtttttccatttccatccagtctgatttagcatgctgatttgagccacgcccttttactgttcctgcacgttggatagcttgtccgaataacaacactttttcagtgatggttgttttacccgcatcggggtgggagatgatagcaaaggtccttcgcttattgatttcattaagaaaatcttggtttgccatgtataaattcttttagtttgtacacggatttgtacacacttttggaagtactctcttttcagttcttcgcttgtcaaatccgtcgtgttaatcgtaattggccgctattttcgctgatcttgactttataaacaatcaatggttatctaatcggttaccatttactctcagcgtgcgccaatgctcagttgtagctgtttgcaatcgttgcttcttcagctcatgaacaactgtggctaaaccacaaattccttcgctaccagaaatcgatgatagcttgtcgtactacaccgatgatggtgcagttgccgttgatcggtattgcagggtattgcgggttcaaaggttttaggtacttctgttcaccatcaataactaactgcttaaaggttgcttctttcgaatcatccaaacgcgcaacaaccaatgaacctgaagagtaaggtaactcaggatcaacaacgatcactgccccctcaggtatggatttttttccgcttggattttccatactgtcgccttttacgcgaagtgcgaaacaaccctcatgtgctttcccagtgacttcacgccactcctcagcatcttcatgggcaaatccctccgctatttcagtccaatcaccggcctgaacccagttaatgagaggaattcttcccttaatatcaggcccgacttctacattaccgacccccaagccaatctcgccatcacctgtggcgagccaatgagcattcacgcgaagcgcctccgcgatctgcatggtgtaacgagacctagccgatttaccagagcaaatctggctgatcgactgctgtttgataccaatgcgacgagccaactcagactgagttaccccagtaagctgcaaggcatggtttagtcgttcggataaagttttcataagcccgcattctacaaataaaactgtagtctttcaacaattttaactgttgacttatctacagtttaaactgtaacattcaatcttgtaacagttattattgtaacaggagacggtatggaagtgttcaacacgacacaaaaacatctccgccgtgccattgacttggtcggcgggcaatcagcattagcacgagccatcaactcaaaacagcaaaacgtctggttttggttgaataaatcagggcgtgttcccgctgaattcgttttacccatcgaacaagctacgcaaggacaggtaacccgatcccagttaagaccggacatctatcccgaatgcccaagcgagctgaaagccagtaaccagtaggattaagggcaaataatggtcagcattttacgtaaacacaaaagcgagttcctccatgcgtgattatggcaaggtctatacccgcttttggctaaagcaaaacgttttgtcctggagtgactcagctaagttgctaggactgtatttgcttacatgcccacattgtaatttgcttggctgctttcgattgccgattggttacgttgcttctgacttgaactgggaagagcaacaggttgccaaggctctaaatgagttagaacaagatcagttcctcattcgttgcgaggaatccggttggactttgattcggagctttctgaagcacaacccaatcgaaaaccctaaccaaggtaaggcagcctttcggttgcttaaagatgtacctgccgacttcgttggtatggcatcgcttttgaaatctcttgccgcttttcaagctcggcttccagaagaattttcatcattgtttatgcctgatggcaacccggtaagggactctcaacggtcggatgactctgagagaagcaataagccaacagttaaaactgttaaccagatacagttcgaagacttctgggatgtacaaatacgcaaagaaaaaaaagcgaaagccaaagaagaatggcttcgcatgggcctcaatgaagaccatgaactcgccttggaagtgctaacacgctggaaagagcaacgagacaaccgattgcagtatcaagatcggactaagacccctatgccacataactggcttttaaaccggcaatgggaagacgagtacgttcgcattgatgaagtacagcaatcatcgacgagcctaaagggcagcaatcaccaattgaatattgaagaaagcaatcgccgcatcgccgaaagctgggccggaccaggtattcgggaggttcgttcaagtgcaggaggttgataaacgcgagtttgctgaggtttggggagccgcttgggccatgtatggcaaaagcgtatcaccgcaattgctatccatcgcatttgaagcccttcgtgcttatagcattgaagaagtgcgaatcggtctgactcggcatattcaatcaccggatactgggcaattttttccaaagcccgctgacgtcatcaagcatatcgacggcaactcgggctcaagagccatggttgcttggaacaaagttgacaaggctgttcgtcaggttggcgcttggacatcagtgatgtttgacgatgcgcttatccaccgcgtgatttcagatatgggtggatgggttgaactctgcaaggttgatgacagggaatacccctttaagcaaaaagagtttttaacacgctaccaggcttacttgctgcgggacgaagtgggtgaatacccaaggctattacagggtattgcagaccatcagaaccagcaaaaaggatttgatatgcaagcgcctgttgccgtgggcgactggtcaaaagcggcacaagtttacacgagaggcatcgccaactttagcgcagtgcctttaaaaagaataagcccgaaagccattcaggcgcttctcggaaatcaattagaggacaaaaatgaaaacgattaaagcaaaaaccattgcactagcgatagccatgtccgcaagcacttcagtctatgcttttccgggctatcagtgggaaaaagcagcacaaagcgttggtattgatccagtcatgctctacgccgttgccttggctgagtccgcctcacatcgcggtctcaacatgaccagtccatggccatacgcaattcgcaatggttcaaatgcaacctacgccaaatctcagacagaagcggagcaactgttaaaccaagcactgcaagagagtgaaaaataccagctcgatattggcctaatgcaaatcaatttgcattggcacggacatcgggtgagctcagcggcggaactgctagaccccatcaccaaccttaccgtcggctccagtattttggccgaagcaatcaagtcttcacctaacgatttagagcttggcataggccgctatcacagttggaacgaagagcgtgcacgctggtatgggcaaagagtgctttctatttatcgcaatattttacatgaactggaggtccgtcaatgacaaccaatcaacaagacttctatcaattaaacttggcgtacctgcacgcagcacgggaattggcgcgcattgatccgcaagaggctgtcttgcgctttggacttacacgcgatgtggttgatgctctgattaatgctggtgttgacgacctgcaacgagtagcgacctcatcattcatgctgtttcaaccaaggggtaaccaaagccaactgattgagatggtgaagagcaaaggcacaggtatcccaagaatcgcttatttattatcaaccctaaacaacaagggggatgcatgattgataacctgtccaaaagtgagctgtttacccgagcctcgctacttattaaatacggatttaggacaaccattatcgcgctcgatactggtttgccaatccacattatcagaaggcttcacaaagaagtgactggcaagtcaccttgccctggtcaattgccagaatctgatgccattgttaaaagcagaagagccttagttgaaggctccctgctgatggcgctttatgtcaatattggtggtgataatgtctacaagcaattaaatattgatgctttgatgaaggcttacgatgcgtacttggttgcaagggaagaagcagatcttccagctgaaatcccctggaaaaaactaaccatcaatgaaggttgggttctagctcgtgatttaagatcacagcttgcatccttacaccggtgtcggtgcggcagtctgtatttgacggtatcacaacagcgcattcagcttaaatgccctgtgtgtgagattatggccgagcaaaccactagagcactttttgagaactaacatgctgatgcatgatttgattgtgcaccgcccgtgcactttgagagtactaagaagatgacaaacttacttaaatctttaacagcacgctgctggtttatatcactggggctttttctggcgactttggctgcggctcatttctttccatcagaaatattaacggcatctgccaagttagcggctttgccatttctgttctgcaccgtcgtttttttcagctacttgggattcaaagcgacctgtaatcccatcggacttatagccataatcactatgcttgtagcaatcgcatattggcaagcgagttggacaattgttggtttgggactctttttcttagctatttgtactggaattagattcttgagtagccaagttaaagattcgggtagaactttgagcattgaagaaaaatggtattggtataagctccattcgttttttgatggcttttatccaaggtatcccaaaaagccaaaaaaatagccagccaaccacaagctggctaccttctattttcagttccttcctgatgcctgattataggccctaatatcgatcaagttgttctgagcataatctcccgcaagcgatgcatttgagatcaccgctatctgcttatccacaaatgctttatcttcttcggacacactgtcaggaatgtaagcgccactctcatccttttgacgatactcatttagcatttgctcccttagacctagcatttcaggcgaccaactcgatgagtcttcagagttgaatacgcgccccgccaaaccttcattgaaagcttgagcaaacacttgactttgaatcggggtcaatcccattctctgcccttcgctgtatgcttcctgtttaaaatcatcggcgtactgttctaagaactcaccgtatcgattgttaactgccgcaccgaatgcccccgccaacatggcttcagacttagtgccccagtttacttcggaggcatactgcgaactcgatccactgtatgcatcattaaacgccgtcaaaggattttccaaagaggttccggcatcaacggctgcttttaacccatcccatgttgatttgctggccacagttgcattgtgcaagaaacctcgtgagccaggttctgcaagggcttgctccttgtaactctcatagtcttcgccaaaatgattcaaggtatgcaatgctgcatcagtatgcttgccactgaaatcaccaatagcactggcgctgttgaagaacatttcagcaccagagactccgctatcatcagccataatgcgagatcgccactgagagccagcttcactgtttagtccagattgataggtacttgtgtcagaagctacggcctgctgggcttgttgctgatgcgcattcagctgtccatctacaccagaaagattggtttggtaagcagattgagccgaattgaactgcgtttgaactgttgcagcatcctcatagcctcccagaacaccggattcaacttggctttgagtgccaccaaaagtaggtgccgttgatgacaagccttcattagagcgtggctgaatagatcgtaaatcggctccggtagccatggccataacagtcattgctgcttgatagtcattgtctcgttcagcgggcgtagaggagttgctataggttaaagactccatagctgcggccacatacgcctgattatcatcaggtagcaagcgctgatacattggaaggttttcacgtaatcggttacctgcttcaacatgctggttcatatagcgacctaaataatccatgacttcaggattatccgctgctaatcgagttaacgtcgcaccatccgtgttcctttgtcctgatagactgtagctggcctgatcaagctcactaaagcggtttgatgccgtgataacgtcttgtgctgaactctgaagtgactgatagtcttgattagacaacgacatctcaacgccagagcgtcttgaatctgaaaggtccttaaccatcgcatcgcgaaactcagcacgtcgtgaatcactcgatgccaagctttgcatctccccagtgagcgtatttgcggtcgtagaccgagaactgccttctgacgactcaacttggccactaaagttaccacctagatccaacccagctcgtacccttgatagttttggtacacgagatgaatctggcttatcaactccaggcaaattaccttgtggagaatcattgcctcccgttccaagaagcctcccaagaaaacccttatcggcaacttctttctcaccgggattagtaatggttccatcgccaccaaccctaaggcctcccgataacacgcccgataccaagccacgtacagcgtcttttttatcgtctccgaaaccataccgtgtttgcaggtcatcagtaacctgattaacaacggcgctagatgcggaattagaagaaccgatctgacgtccaaccgaagaaaggttgtcgtaacttagcttttcaccaaaggttcgactcatggtattgccaacctgacggctaaaggcttgagttgcctgagtcatggattcttttgcagagccgaccattgaacccactgcgtttccgacagagaaactgcttagtaggtttgacgcgccggtcatagcagaaccagtgagggctgaattttggaacattgactgtgattgcatcaccggggcatttttcgcgacatctggacttgccatcttttcatcaattgcatcaccgttttgaagacgtccagccaagtgggtagcggttattgctgagccatacacgagcatgagcgaaatcgccggaacactcgacgccaacatgccgccagtagctatccaggtttgcagcactgaatccatctgcatcatcccagcaaaagatggcacttctgtacctgcaaaggcatcaagagccgacattttcccagctacagttaaatggatatataggttaatgatggccatgacaggcatccaaagttgaatccaaagcaggattaacaagtacttcccggccattcgcatcccgatttggccaagggcaatcacaaaggccatcaatggggtgatggcgtaaatgaaaccctcaaaaaacgtcatcatcggacgaacgatactttggaacagggtctgctccgccgcccattgcgtattgcgctgctcaatcgcttggttaaccatcacggcggcggtgaaagcttgatcatccatatacttgcccgtcacgctttgctcataaataggcaaaagcaccgacgcggtcatgtactcttgggtgttaaccgaggccaaaccaagattattcagtgcatttcggatcacgtcatcagtgtccgttgctgacgaagtccccaatgaggccgacagaacctgtttaagccttggaatgaaggttgattctgtcatgagtttcagttggctgtaggcatcggtgcagtccagatcgctactgctaccactgagcatgatgcgtgtgccataaatacgcgaatcaaacctaatcgcagtcattgggttggggtcactcagcacctgatcgaggttcttttggccaatgtcgataccaatcaaggtgcactctttgatgtagttaaaccacgattgctcgatgtccgaaccggcgacacgatttgcatcacccaacccagagcgatccatcacctgttttctcactttaatcagtgactgtaaactggatgcaaagccgtattccgtcatggcgggagttgagaacgccgtttcaaacaatcgcgtgatttgaaagccaacagtcgaaatcgtactgcctgcggcagcaacaccgatgggcacattatcaaccactcgaacttgtcccgtgtacgcatcctcaatgctcactcgggtactgggtccaaacatggttgcaaagactagccatgagactaaaacgtgttgaaagttaatcccacgaccgccttgcattaaggcctgaacagagaccatcaataccccaatgagcaagccaatgcgaaccattgaagtaaaatcgcctgtaccagtgatcatcgcgacagcgttcaggacctgctctaaaaaagccgaatccccgatggaatagatttcccacatgacctattcccccagcgccgtagatttaacggtgtaataacgctgtttgcgaatggtctgaatcacctggttaaaatgcgccagcaattcttgctctgagccgtatcttcgctgcaacgcagcgtactcatcattgatttggcgacgtgcacgttcaaggtcttcggttaacaacttcgcataggcatgatcttccacacccgatgtgcttctagctgcattgagcatgtcttcaaccaatgcccgggccatctcaacagcaataaatggtgccgctcgtgaagcaaacgacctagcggccccttcatttaatgcagaaagtgttcgaatcatgccgccaatactcgcaggagccgaggtcataaaagccttttcggtggtgctagcagcccctgtatttcgagcaaacttaaaaataatgccgttactagaacctgtaccaagaagtaaattttctacctgagttgataacccggtaagagtcacgttagtgattgttgggttcagacaaccgtcttgcgtcactgtgtcacatcggtacatagcgacgttaccgccatgaattagatgctcaatagtcactttattgccatttagtctggtcagttttggggctttaccttggccatcagcggcattcgctaaatcaccaacgatgatcgaaccagtcaccgacataaccgcttcaagaaaacgatcatcccccgatgcaaaccagcttgatgccgagtgacgtttcagtgctcgccagaccaagttacctttaattgttttgttcacatccgatgccgcgacacttgaagcgttctcataagggttcttaccattggactcactccaactggtaaaaatgtctccagcccctttaagtgagctcaacatgctggcttctgtttgcccctttttaccaaaagcagccagggtatcgttcacgactccctgagccatttgacaggaattgccaaaatactcgttcaactgctgtattttcttttgcagtgtctccatgtgctgagagcatttctcacacatagcactgagcgctaattggaatgcgtatcccttggcatttgccgctacagagcgaagtaattgaacaaactgatctgcattaacaaatgacaaacttccagcgaacatatcaatgccgccacaacctgcttggaatgaaggaggcaccattgagacgaggttttcgttcatgatcctgttacggacaacaacgcttccaccagatataacgccacgccgctgactctcgaatacaccaggcgcagtggtgttggtcattgaaccaaacaactgattcatctcctgttgcaagcttgcttggctcatagatgaaaaaccaatcgcacaggcgataagcgatactcggaatacttttttcatcgttataaccctccttgtgcacgcagatagcgaacaagaaactcagggttctgtaatatcttttcgttaagctcttgggctgacatcgcaagtgacacgccgggttgaacaggtctggtggcatagtaagtttgatcgtcaatccaaccggcttgatgggctgcgagaatgattcgattattgagctcatcgaggctcattgcaccttggccaatcggagttatgacgttaggcgggtcaactaagaacacggcagggacagtcgtaactgacaatgattgagcttgtcctgaatcgactttgtaattaggaaactctccaccaggtaaaggcaagccatcgacagcaatagcaaacacctcgaaaccgtagttcaaagccatggattcgatgataggagcttgagcatggcagtaaggacaatccgaacgatagaaaaagaacaagccagcccgttttgctacttcacctaaagctacatcacgttgagcgccagcttctcgatccatccgattggcagcataagtcgccaagggtctgcgactgatttcatccaaaacaggatcgcccatgaccacctgctgactaacatcagcaaatagtgagcccttatccatcatgacgcgctgaagataaagataggctctgacattctcactcgttggctcatcaattgccttgtccatgaacgactgcatgtgctcacgaaaccaggcagcactgaaaggctttagcccgctcttactcgactctgccgcaccagattccggcttaataagctcttcagcctccgctggcccaggaatgacttgataccaaaaccagccttcctgaccacgctgatagaatggctcgtcactggcataggcgggtaagatgaatagaaagaaaataatgattgggatggtcacccataggataaaccaaggtaacaaaggcgttctcattgtcagctccagaaaatttcatagagctaacatgctaaagaacgccgttaaggtgattggccagatagatgaagaaatcgtgtgtgtttctgactagctgttatgaccagtaacagtaacaacagctaaatttaatgagccaaatttataactggaccgctttctgcgaggagcggacggtcgaacaaactcgttttgggacataaatgagttacagatttcgcttaattagcagttaaagaattagaaaaggtattacaaaacctcaaatggggcgaccaaatagattatgccactacacttggttggatcgcatactcctgaacaccagcggccgtcaacaactcataaaaatctgcgacgttggttcgttgccctctttgctgacaataggaaaaaatagccctttgtttagcgcgagacagtgctacaaaaaatgtcgatagtccttccttatcaccttgcttataagaccaccaagcgttgtcgtctatccccatgaaaatggttgtatcgaattcaagccccttgcttttgtgaatagtcataagaggaatatggttcgtgccttcaaactcatctagcaaacctgcccaagagttctgagtatcaacacagtttataaaaaattcttcgagtgctgccaagtttatttcaagtaaatttcctgtagcgtaacgagaaaaggagctgcgaagatcgtctgagttaataaattttatagttcgctcaaatacatcgcgaccattttcccgtgtcagaggctgttgcattaacatccgtagtgtagaaatgaactttgttagctcgcgttcaacctgtcgtagtgccttttcgtcttcctggttcgtattacgaagaattcgaatatctgatgatagttgattccacgcttgtgcatttcgacggaccagtcccagcctaagcagagtagagaacaaaatggtcagttcttcagcaagcaaatcttgtaatgtagtttgacctattttcacactctcatttcgtaagctcagtccatgttgagcgagataataagatagctgttgttcataatcttctggtttttgacgcaccagaatagagtagtttcttggattcagtgacctacctagcaagtcatttgctatccactcagccaaatgagcagcctcctgatttatattgtaactacaacaaatccaagcggcatcaccagaaattaaattgatattacttgtctgaacctctctcacttcatggtcaatagcttgtgcaataacatgttgtatcctgaccaattcaggtgaagagcggtgattaaggagcaatgaatgtcgttctgctgaaaagtcagcctcaaattgatgaaacacatcacctttagcaccggcccaacccattattctttgcttgtaatctcctactgctgttacctcagcctcacttgatttaaaaacagaagatagaaaatcatattgagcaaacgtggtatcttggaactcatccacaaaaacaataggatatgatgctctaatagatctacgaacatgatcgttagtgcgaacgatatattcagcaagtcgatttagcgccggaaatgacactctggaaacaccgtcggggtagtttatttgctgactcaaccaaaaagttaaaaattcctcctccaaccatgacaacttgggatctcctatacgcacacttccgataaactgattcatgttttggagtctttgcgtaaagctatagatacctactgcgttcccaaaattatttctgaaactactaataagctgcttctcttggtgaaaagatggaaaagagatttcatatcgctttgatgggcgatgatgctcgggcaaagccatgcgaaatcgatctattaaattcttagtgaatgcatcaaaagtcatcgaaataaatcgattgctgacttcttctgaacaacgctctttcactctatctgcgagattttttgcggcatcagtcttgaatgaaatcgccagaatttttttgtttgatggacataggccagtctcaagcagatatgcagccttttgcgctaaaaactctgtctttccggctccagggccagcgataatacttgtggactctcgttgccttagtgcttgccaagcatttggctcaagatcgtcgatccccttcggctgccagtggtcaggtcgaataaacttcaccttgcctcctggttttgaagggttgtgtgaatagctagaactaaagcccgtagctcttctggcgcgttttgagccaactgatctggcggaatagagccaagcactcgaatatgcgtacttggtttacctcttcctaagaacagatatctgtaccagcgcaagttaagtacatcatccgcgtagaagccaggatacccttcatctcccataacagcattgcctggatcaccatgcatagatggtccattagagctttcatctgggaccacccgataatggctagtgaatgcttttaacatcgaataatcaatgtctaatgggcttgaaaaataaactttgtgccgcctgagccattgaacccactgattaatgttattccaatctgaaaccggataattatcaaatgcagcaaggttatgttggtagcctaacagattgaggttttgcccaaatatctcacttgggtcgagcccatactctatcaatttggcaactgcattcttaatccttccccagccaccgccgtgccgtccccaatccagatcgagtaatgttagaaaagggatctgtaaatctgttagcaaacgccacatgtggtttacatggcggccccctaatggaaccatggcgacaaaagatttatcaattggtatgcccatagcttctgatatagcaggaagaattacctcctcggaagccccttccccgagaacaacaactttagcgaaatacaactctggataggctctcaccgcttgctggatgtactttgcagcttcattctcctcatagggtaaagtcagttgacgaacgacagtggtgtttgattctgttgctagtctgaagtgccttacttgtgttggctggattctggcgagaatgctcggcgaatggctagatagcactgcttgcgctcttaagccatgcactaaactgctgatctgacttatgattcgagatagatagtatggggctaggttattctccggctcctcaagtgccaaaatagtcaacgagggcaagaacaagtctgcaccgagaaaatcttcactctccggttgggctaatatctcggtttcaacatcgagagtagctgaagtcatggcgatgtgaaacagcgaactttggccatcacttagctcatcaatgctcctatcccgaccactttcatctgggtgcagcagtacctccaccttacgaacgaattcttcaaagcgtaggtcgaccgggcgaaacttcggtgtactatcagttccagcagagtgcagttcatgccaacgctctgtgagctttccggtaacgatactaatcgccttttcaccctcaaaagattcgttcagctctgtggctttttgagtaaaagatgaccgaacttgttccgaccagttaatagccttccaaagtcggcttttcagaaaagcggatacctgagaaactgcgcatcgtgtggcagggacgtaaatcagttggattcgagaacgatccgctggacgtacattttgaaaatcagcaacttctggctcgccccatgtcgtaaccgcacggaactggctcgtaatgtacccgtctattgagccatcatcttcccattccgcgtccaagcgcaaacgacacttcagttttccaccctcatctgtaacgctcatatgatgaaaaaaatctggtatcacagagtgatctccatcttcatcatccagttcggggaaggcgacaatggcttcaagcgtgagagtccgcttgctgggtatttcttcttccaaagagggaatatgaaaatcctgacggcgaatcgtccgctgctcattggagatgccaaacattcgctgtaaggcctgcatcaagaccgttttcccagcaccatttgctccaaccaaggtggttagatccggatcgacagctatgctctgcccttctggcccgaaacttctaaagttctgtagatttattctctcgatatgcacagcagctccctctcctatatgcccatagattatatggggcttctattgcaaactttcaactgacaaagtacggccatgtgatcgcgtatcggttactggatcaaaaacgaccaccttggggtgccgtaataagagctacgttgaagtcgcttcaagcagtgttatcaggttagttatccccctgacaactgtttcaagactctacgatagtcatctccagacatcgaagcactgacgccgtatgccaaggtgggagcaggcaaagtcatcacaaaatctaccttaatggttttatcgaaaattgacggcatcaacgcttctagctcaaatgaagcgaacaggggcaccactttcttctcccaaattttagacaatgtagggcaaactgcataacgtggtttgagtggttacgcgttgctggcacggaaaggggctgaaaggagttacgcttcaaggtccactattggcacgtaattaatattcagaaatttcgaatactacattagctcactttactgcaaaaaccgtaaccaacgttttcattgagtcctcagaaatcataacaaagtgcattttgctaccaacatgctgccaaaactctgcctcttgtacatatttttttgctttttggatagagacgctttctggtaactcggctttagttagcgcagaacatagcagcattgagcataaagccttccaaggatgcttgggcactccattagaaagccgttccacaaaccgttccagtgcatgacgagtcaccacgacaggtccaatgttcggaacgttgattacctcatcgatttctctcactgtagcattatcgacgctgtattcttcgaaggaatgtgagagccaatcgccccgcttctctaccgagatctgtgcttcttggtaacgggtgagcaagaacctagtcaagctgtaaagtgaatgctgagttgagcgttgtttctgtaactttctgatggctcctttactgacccggatttgaagcccattgccgcttcggttactccccatcacctctttcactgacaataggtgatgaatagcatagagctcagctgcaattggcttttgctgctcaggtagcttgtcgtattgctcacctaaatcgacctttagctcaccacctcttcgaaggccggtcttccagtaaaccgtaaactcaccatcaatctgctttgttaacagggttaataccatcatgtttgtttctcctattggttatctatttttcattctccatgttttttcaaatatgcaaggcgcaaaaaaaggggccgaagccccttggatcagatatgaactttcgtaaagcccatggcaccgtaaacattcagcacatcattccaatcccaacttttcacgccgagtgacgttggtatcggggggatcaggacttgtgtcagaatgcctttttgccaggcttttttcttgagttcattcgctgcattcaggccggtctcagagagatcgtgatctgcccagatgtacagcattttcacattacttggtggttcaaacctagccagtagggttgcattcacaaccgaccaacatgtttgtcccgttgctctggtaaccgctaaagctgtttcgatgccttcagaaacacctaatacttcaccaggctcaccaatcggaatggcaccgccagtgattgttctgtcacttggtatgggcatcatctttttaggcttttcaaccggcgctttgaatccatcttcacttaggtagatccgatgaaacgtggccgaacgcccttgctgagtaacgattttacctagcagcgctgggtagctatcgataaacagaccatcttcatcatggtaaggcaagtttggatgaaacctcagcaccgaatcccattcaggacgaagccgggtaacaatgccacgacgatgcaagtagttccaaactggttgcgcacgagtatctgcaagagatagcgtttctccccaggtttgattcaagcgatggataatcgctttgtcctcgtcctgctttctagccttccaatcaacagcgttacgcgttattgcccgagaaggtgcttgtatttgtccgggttgaataccaagaacttggccaattgcttcaatagactgagcaaagttccacccattaatccaagacaacagttcaaagccatcatgaaagatcccgcaggtgttacaaacgccacctccggtatattcagcatctttgaacagcctaaaaccatcacgaccgccatgaacaggacaagccacatgacggccttttcgagcaatagcggcatcaagttctggcaccaacgccgccagtatttgaagccattggccattaagatatggccttactgtttcaatttgtaaaggtaacgccatataacctccttaaataaaatgccgactcctaccacaggtggtaaaagtcagcttaggtcctgcattgagccgtttggttaatgcaggaacgttagtcaagctggataccatgtcgtcttaatagccacatgatggaatcacgaagcacatcaggatcgacaaccgcagccatcgcgcaaacacgaaagcaaaatggcgctatttcgtcattttgaatccacgacaacacatcctttcgcaatcgagtactgacacgaccgtccagcaatacacggatcgcatccaatagaatgccttcgcgtaactgccagatttccgtgtcagaccaagtgactggggcatcatcaaactcaaatagaaattcgagctgtgctgatgtgtgctgataggactgcttttgtgatgaaggagaatgggcaatgcgcccattcattaaagataaccgcgttcggcaagcgaaacgcagccctcggatgcgaccacgacatggtcaagcgttcgaatatcaacaagtgacaaggcgtcacgaagtcgatgagtgatgcgtttatcagcttcactgggttcaggatcacccgatggatggttatgaaccagtatcactgctgccgcattaaattccaacgcccgctttgttacttcccttggatacacgctcgctgcatctaaagtgcctttgaacagctcttcaaatcgaataacgcgatgctttgtatcaagaaacagcacgccaaagacttcgtgctcatactcgtgcatcagtgtttgcaggtatgagaacgccgatgatggctgttcaattttgcgacctttactcaatcgaccacgggcaagcttaagcgccatatctaaaatatccgcttcagtcacttgctcaggaacgatgtaagtaccggcttcttcgccagctaagaattttttgtttttcataggagtctccaaaaaaaacggagacgaacccattccctgaaggggacggaatcgtccccgcagggtggtaaaattgatgtggttactgaattaacagttgttgtgttacttcgaataactcacgcttcagatctttgacgtcgttaatcacgatgctttgaggaaagaatttctcaacactgcgtgtttgaatccctattcccagcagctcaaagccacttcgtctgcaccggtcaacaatgtcatgcgtggcagcccaatcatctgggtcaccatccgttagcactatcattagctttcgcttctgtttttgcgctaacaaactatttgccgcaaaccacatcgcttgtgccataggcgtacaacctcgtggtttttggtcaaaacaggcggcccgatgtcgaaccgattgcttgggcaataacgcgatagaaacttcctgatgaataccaggaaaataactgaccgcaggtacaacacccggtatgccttccagtgccatggccaaagccaaagcggcttcattggcaacatgaaagtactttcgattaccttcgccaatgggtttacccattgaacccgatatatcgaccagcaagtgcacagcagcattaggcgcaatgcgaggttgcctttgaataaacaatctcgactcaccggcttgtgaagcggcaagacgatgggttgcaactcgaagaccgtgccttttggcatgattccgattgtcctgactggactgaaccatgcccctaagtcgggctcgaatttgagcggactcagacgccgataaggtcaaaatggcctcatcacccaacatagcttgctctgcttggggcaaactgagtggagtgacaccctgatggccttcagcttgttccgacaacacttctgccacttgggcaaaggtatcgggttcaaactgcgcggcactggcctctaaggcttgtcgcaaattgtcagcttgatcagagttatctgaatcccccgtttcagcagcatcccccattgcagacgagtctgcttccggggtttgactgtcactactgttattgctgtcattactcgcatcttgtccaatgtcattaccgctatcagcatccgactcatcctgtggtggacgagattcgtcttccaacatggcaacgatggcatcgacaagtttcagcacttcacctgtagatgccaggctaggcactgctgtcagcatggcgcttaaccggctcatcgctgcggcaggaaagagttgtctcactctttcatcaactgcttgatacaaaggcgtcagtgctttctgacccagaaaatggcatctcaagcggaacaacaaccatgcttgcaagttagatgcaggctcaagctgttcaggtacacacatttgctgagtgtccaccatgtactcaatcacttgcgaaatactgcgccgggttccggggtaatcctttgccaattcgttttcaattcgcacatcctcaatgatattgagaagtgccttacggatcggtttggacgacgccttctgcaccatgtcaaaattggtatgccgaatatgcgccgcttcatgagccagataaccccaagctatctgttgatagtgtgggtcgtctgggtttgctgttgggatcacaatccgctcaccatcggtaaacgcatcttgtccttgaataagcaccttcacaccaaacttttcgccataagcggcggcaacgattggcagtgcgttttttaatggatgattcatgggagtctcctaatcattagggggaatactccctcagcgggagcgtttccccgctgcgaatgtaagtgtttaaacctgtgcttttagcttatccagatcgtatttttgacctaaccaagccaccaattgagctggactctcgtgctgctcaaatgacgttttaagctggtctaaactcaggatgtcatccaatgtcagaccgtactggtcttgtaactgagtagacacctcgtgttgatattgcatccaggcccgctcaaaagcggtttgctgcaatgccatgtttggaacaaataccatggccgttacccaagctccttgtgcgtccgcatctgcgatcaaaacagggttcttggggatcacgacactatgtgttgagtacgaccgttgtactaacgttcgacaacacgccacttctggtatcgattcactttcaaccgcatcagtcacaccacgaaaatgtgcttcaaactggttcagttggctggggttatggatggttgattgcataatttcctcttacatagttcagaggacatgcgcccttcagggcaacatgccctcaaggacgttagaaataaaatgagtttggtacagtcgaaccaaggtttggtctgacggttggttgtggtattgcacgtaagttatctgcctgagcagaaactggctgtgcgggtttaggttcaggtttgggcatcagttgtctgatatccaattgaccttcaccgtgcattctcatcttgtctggatcagacaaaattaaaatggtcgccatcagttcgtgatagagattgtctatcacagggccggtcttcggcagacgaacaaataaattgtccatcgcttcaaccatcggctgaactcgatgatccaggaaggacaaaccatccaacttgtctcttaaccgcttgagaggattaagggctcgctgactgatttgattcttacctgcaacggaacgctcaaaaagctcattggcatcacgagccacctccctaaagagggtgtgtcccatgccattgaccttgtcatctaagcctccagcttgttcagccggttgcattcgatagatggcataatcgaactgaagccgttgttccacgtcttcgatgggtgataatgcacgtcggattgcatctgcaaattccgggtgttttgcaacccagtcaaacgtcacctgatcatagttgtccaggaacaactgcttacactgcgcaaactcctgaccgatccggtcaagctcaggaacaatctgatcaattcgatcttcagggacggcatagccacctaaaaaccgtacaccgacttgctcacacaagcgctgcgcttcttttttaagcctttcaaagttcgccaatgcctctgggtcgcaaatttttttactccctaagctggcaacatccttcggtggaagttggctgccattagctaatctgaaatcttcaggccttagtttttttctaccgctccagatggaacagtcgatgtgacaaatcaacagtttgtcgagggtttgaatactcatagtgcatcctcatgcgagatggggacgcaccactcccaacaggagcaatggcccccgtttgagtggtagtagttgacgcgctaatggcaataccactatcagaaatagtaattttgcgaatcaggcgacgattggttgagatcgattttcacaggcattaagtccagtgcttcagctatcgggcgaacccgctctaaatcactgcctagcaaccgcaatacatctttttccaacttcagttggtcggatacttctatcccttcaggactcgctactgtgagcgaacacagtggtggtaattgacgcttaaaagccagtaacagcaacaatggccacgggccatcatcagtgttaacaatgccagcaccttcacctgacaccatgctgatttgattggtactaggtaatccgcttttgcaaaaccctaatgaccattctccaatcctgacctggttatcatcaatgacagccaagccataggcttcaagcagctttgtcatatcgaacaacgctttttgcgccagcgagatttggccattgacgtccttgcgagtacgaaactcccaactgacgttattggcgcacgcgacgctatcaagcgcatttgaaagttcaaatggccgcccttgatgatcaatgccgacttgtccaaccaatcgataacccttgttgattttctcattgattcgtcggtctgcttcagcgttaggatcagtcgagtcaatcaatcgctgctgcgacaattgaccggcttttccaaaccgaacttcaatctcctgggtatccgatccaacgtaaatggcccattctttggctgtcccatcagaatgactgtaacggtaaagagcaaagcacttatccatcatcaatcctcccaatggtcaccgaagacatcagcggcaatacggtgaatggcttcacgttgctccaactcagcacgagccgtcaaagaccgaatcagtgcatattccactgcgttaggagcgcctttaaaagcaagtgttaactttgcccagcgcaccaaggtccgagtggacatggtgatactaagctcagcaccgccatccgcgcccccaataaagagacgacgaatgtcaccagccactttcaccattttctggcgaaagacttctggcaagcccggcgcaacgttctccagaatggcttcctctacagaaggctctgcataggtcgcttcgatgattctaaagcgatcaagaaaagccaaattctgttggagcacaccttgatacaagcccgtttggtcaccgctgcccgcactgttgccggtagcgataaaacgaaacttggcatgtggcatgatgatctcaccgccattttgtgcgatgaccaacggggcaccttccaaaatgtcattgagcccagccagttcagcaggctcagcaagatccatttcattaatgatcagcaaatggccatgcttgacagccagtgccagcggtccatacacaaaggtcatgttgccattaaccagcgtgtggtgaccgataagatcggacaactccaatcgaccatgtgcagtaatttgctgaacaggccaattcaatcgagaagcaacttggcaaattagcgaggtcttaccgcatcccgtggggcctgtaatatacaaaccgtcaccgtcggggttagacaagaacgccaatacgtcacgtaagtcttcttttctaaaaacatactcgtccttgcgaacgggaatgtttggatgggtagtgtcggcactaaatccttccagaacgaaagcatcaggagccgggacattaaacgcttgattcacttgaaccaaaaatggggattgttcagtcatggtaaacctcatctgttttgacgaggccccatgccccaacagggactgaagtccccgtcgggtggtgtgttgattgtggtatggctgtgtatgtaagagttcagctcgctctatcattcgtacccagcattggctacgagtgaaactgctttctgatgcactcgatgtaagcgcattagaaaggagccgaaatcggctccaagtgaacgttaaaaataaaatgagctcggcgagtcacctggcagaaccaagttctcttgctcaaggctaattttgattggtgtttcaacgggctgatctggcttattggtgctgatgcgcaaccgctcttgtggcgcttttcggtaggctgctaaaacctgttcgtccagctcgcctaatttatcggtggccaattgcttatagtccaccgtacccgccatcatgtagcggctgagtttgaccccagcatagtcggcatgagcgtagttacccatcatggcgaccaattttgactgagcttctcgcatttcttctttcaaagatttgatgtgactttccagtcgaaccacctcggcatgtgctgagcaatattgccgagacagcgatgtccagcggtattgggcttcacccttgggaacaaaacaatcttgctcagggcattttgacggttctcttttggtttgaactaactcccaaaactgaagcgccgtttcttgcaattcagttaagaacgccgcgtctcgttgtatttcaaactcaatcagttgatcctcaaaatagaaaactaaccaaccacgcgtgctattggcgacctgtatttgatgctgtacctgcacccaatacaactggtacgcctcgctttgttctctgtgagcttgcacatcctcaaaaactgactggcaaggacatttcagttcaacgggttcgcccgcatcgttgatgccatcaaagctggctcgaaagattgcgttatgatcggcttctgcacataacggcagaagaaagtcattatgcgcattctcaaatgctcgccttgcttgaggctccaaccgaataccgcgaagcacattaggattattcgacaggtcttccggtaatacgaatccggttttttctgcccataatcgccaaggtgttttgtagggagaacgccccataataattggggcttcagatgccgtaacccctgcaatgcgccactggtgccatgcaggagtacgctgtgataggtcgataaccttcatattgcctcctttgaggggagactcccccgaaggagagaactccccttcagggttaagtggttactttgcagcttgtgctaacgctgtttggtgctgaacaacacttgcttgaaccgaatcaattgccgctttaccggcttgaatcgaacctacgacaagggcaacaaccaataccaagcgaaaaagtgaggctgatttagtcatggaagatctccaaaaaaaaagacgagaccttccccctgacgggagaataatcccgccagggttagtaaaatgaatgcttgtcgctaagaagctaaaggctgtgtgagcgctttggctgcttgttgctgagcattaaagatttcttgcttcgcaaacgtcagctcaacaccttgaaaatgttcattggcatattccaatgcactattccatgcgtttgaagcttccgcccgctcgataagcttgtaaacaagccctcgggttcgatcatcaacttgctcgggtggaatcacagatggctcaacaacgtgtgttgcttggccttcgataattcgctccgcttcgtcttgatcgaaaattcccacaaagccaaacgcaatgcgggaacactggatcatggatttatgtcttagcattcgcttagtgtgcgtctgccatggaccatctacacggtaagggccatttttgccgttaccctcaaaaggcggtcgatagacttcatccagatactcagtgattttgactgggtgcgaacggtcgcgccgatagatgatgcattccatccattcagggcattctttcgcgccatccagtgagactttgttttctgaagtcttaaactccatgccatcaaactggtcgtgttgattgatgatgcgagaccatccatcgacacctaccactgggataatcccagcttgtttatcagggaacgcaaaaatctctttggtgaaagggttcaagccgtactgatctgcaaccaccaagagcgccatcatctgctcattggtaggtgcactaccgtcacgttgcttgaatgctgttgcttttagggtatcgaacagtttgtttggatcgacactaaagcgctcagcaaagcgttggattagctttggtttttccattgtggactccgacaatcaaagtgggagtctgcccctgacgggaaagtactcccggctgggttaaagcatttttgctcggttaaaaatctggttcaggataagtttgtgcccaattagcttgggagctcgcatcatccgccggtgatggctcagatgctttattcacactatcaagaagcagaaactcgtccgcgtccacttcggtcaatcgatgcttaatgccatctttctcccatgagcgcgtgcgctggggcccttgaacaaaaagcttcgctcctttttggatcaaatcttttgcccttagccctaacttaaatccaccacgatctcgaaaaacaacccgatgccattccgtatgctctttgagctcattggattgacggtcgcgccatttctcagaagtggccagcgaaatgctggtcaccaaatcacctgatggataggctcgcgtctctggctcagagccaacgtagcctatgagtgttacttggtttttcatgatgttctcctcgtcttagttgaactctgtgcacacagttgcttctacccggctgggcaaagaagactgacgacgcagataggttggtatttcgagtaaagccatgtcgtactgatgtggctctttgtaaaacgcagatgtcaaacggggcataccaggagctttaggcaccgccattggacgacgttttggttttggtgtgagcaatcgcttgatttgagtaagtacaaatcgaaacgggcgcacgctttgacgagcaagcaatcgcaaaagcgaccagctcagttttgcaagcaacataatgcctgcgatttggataataaatccgaagatatattccattggtgactccttatattggttttgaaggagtcacccccaactggggaaaactcccccagttgggtggtgaaaaggcgaaccgtaaggaacgcatggttgagcatgtaaaaacatgcaggctatttgtttaaggaggctagctacctcttagtaccactgagaatactcagcggcgggcttcctttgagctcatgctcttaggcgcagatatcactgaaacagatcagcaatatttgatagtcagtgtaaccgtcttatccagacaggatagttagaaagatgctcaattcttccacctagctgaaaggccattacctcacagaggattaggctagggactgattattgtcatatcaggagcaaacttatggcccaagcaaaacccaattactcaaaacccatctttgaacaatcattcacaattaacagcttacaggcacaacgtgtcgttgaccgtgtttttagacggacggtcagtgcgctttacggaatcgatgtcatcctgcgcatcattggcgatgagaacgaaattgatgaagtggaacagatcattagccagttgatcgaggattgcgctaaagcggtagacagcgaacaagctcgtttggacaaactaatggagtccaacggcatcgatgaagtacctgactacaccgacccaattaccttcaacgccaaaataagctcgccccaagttggccagtttgttggcttagttcgcaaactcgatgcgttgatgatctcaatggacacactctggttatctagcgtgcttagcaacaagcaacgtgttgatggtaactacgcatggcaacagcgcatcatcaaactggctcgacgcattattgatatcgaaattcgagcacgaaaatcagcccaagcgaagggtaaagaagcagaggttgaacaagcggtgcctttaaccgatgacgatatcactgaagaggaaacagatacccccgccaactagccaactaggctcccatcaaccagcccctctcgaaggggctcttcatcttgctgtattttctatcaaaatcgttaaaatgaatttaactgtcatttttggccaatttacatgaatagaactaatttgctcgttactttctttatagcgttgttcgctatccctgcatttgcagaacacccaacatcgttcagccaggcaaaacgatttgcccgagaaatttaccaagacaaccagagtacgttttactgtggatgtagctataacaatgatggtgcgattgatgctgcatcttgcggatatgaaccaaggaagcaaccgaaacgaggtgaacgcttagagtgggagcacgtagtctcagcttgggaaattggccatcaacgccaatgctggcaaaatggtggtcgtcggaactgtgaaaagaatgatgctgagttttctaaaatggtgtcggacctccataaccttgtaccatcagtaggagaactcaatggggatagatcaaattttcgatttggcatgattccgaatgaacaaagagcctacggtcaatgtgatttcgaagttgatttcaaagaccgtcgagcagaaccaccagctaaccgtcagggtgatattgctagaatttatttctacatgcgtgatcaatacggcctaagactaagcaggcaacaaactcaactatttgaagcttggtcaagaatggaccctgttgatgaatgggaaattacacgagacaatcgaattaaagccttacaaggcaataaaaaccaccatataaaatagataataaaataaaataataggggcagtatgcccctattctagattcccactaattaaactgtatttatcttgaaatctcactttgcaacttagctacgaatggatctatggatctatcgtattcattgtagtgatcaatgcccgccattgaaccatattcatcgtcagctttttttgcaacattgttgacctccgagtttaaatctgtgaaaaccaacaacgaaccatcaacttcctcaaaactctcactataagaaggatttaacaaccttacagtgctagacaaattacctaaagccgcattaaaaccggaaacgtctaagatcgcatcggctttacttgagccatccaacttaacaagttcagactctctatcgctaaaagcctttgatattagcgacttcctattctcaagtattgcttctcgtatgagttttttccttaactttgtacgagtagacttcgcagaagatagtgtactacttgaacttgagctatatgatggctcatcatcttcagtaacagcatcatatattttttttgccccccatataacaagaggagcagcgagccaccaagccataaatacctcccatcaaaagttagtcgctagacttaagaattaataacgtgtcatcgataagtgagacacatacatcaacttcatcaatatcatattcaactttcgcatcagcctttaaattttcaatatattcatcagttttgatgattagctcatccaaaccagctttgattgccttagatgtactattccaatactcagttacagctttctctatgtcatcaaacaccgactctttacgaattgcttctgcggctttttttgcgagtgatttttgccaactaccaccagctagtcgatatattatgtaaccaattgccgcagcaagagcaatacctatggtaataggaccaccgatggctgcaacgaatgaagttactgtagtaacacttccaaccaaccctaaagacaccaatactccagctgcctttccaactaaaatatatgcacctaaattacttgctatagtcgatacatataatgccatagctccaagacttcctaatcccgcaagacctccaacaaaagccgctctcgagttaaatgcactaaactctgcacccaatccagatatttgggtatcaactcctgtagttgagattgtgggggcagcttcctgccatctcagcaacaaagaatctaattccgtcgatacggctttaccactagtctttaatgtgctttctaattttgtagtcaaaagctgaccaatataattgcctaactcagattgagcctctttcttgtccgaataggtgtcattgataagctcttcgagaccttcaacagaagtattgtatttgtaataggtactcataacatccaagtcgtgttttttgtggctattacatgattcaatgagggagttaaaatcttttatcaactgagtagacaactcacgaaatcgcgcatccttctcgttgacctccttaattctttcgaaagtctccgatttcttgttctttagattatcaatctcactcaatagcatattttcgatattctttagaatattagaaatatacttatctactattgatgcttggttcaaagttagagacgaagccatttcggtgatttttcgcaatgtatcactacgatagtcattattttcacgccaaaatggttgaactcgtgctgttagttctgaactttctggtaattgcgtaataaatccatcttccatccatgatgaaaatattaaattatctagttgcttcttaattctcttgaaggttacacgacctacagcttccacatcatccctgcttatttcagagtgacaatgagactggatgaacattaaatgatcaagtggtttctccttatccactggtggtctctgcctgatgatatttgatgcaaaccctaaatcactatctttgaaaaacccggtatgatttgaaacaaaaacaacaccatcagcaagttctacaccaccgagagccttctcagtatcagactcatctgaaccgttaagatcccctggggtatccaacaaccaaaccgaacgaagtatctcggaatctgaaaaaacaattgcgatataagcctcatttaatacatcatcttcatgattgtgtactcctaatctatccaatatttctgaaccaccttgttcaattaaatatttttcgacatcaactggtgaatgaaccatatgcggcttaaagcccttcttaaacacagccacatttcctgaaattgtttcaggcttatctgattcgtgcataagaagattaacaacacatgttgctggttggtatttggtcgggagcagtgactgattgataacagtgttaatcagtgttgacttacctgcatcaaaatgaccaaaacatccaattacaggctttctattaagtccatctactacagcctcaagctgttcaaccttacttttaagccctattgaatcgatatactcatgattgtagcaatcgatactatctttcactgatgaaataagcgacttcgctgcctctaccttaattttgatagtttgctcaccaacttctgacataatgtaatcatcctctttataagtgtattccgttaaaatttcataatacttgcttggctgaatcccaacagctgataaatacccagcaatcttaattgcatcagcattcattggttgactttcaattcttgaaacagcccgttgatccagtgttcttccaattccaaaaacctcagaccttgcagcaacatcactttgggacaaacccgcattttctcggcttgaaattaagaaagttcttaaacgctcatttagttcatcgtgtttcatttttcagacctatgatttcagccacttgtatataccgtaagttccagcaccaatcgccaatggagctgccgcagtaattgcaagtccggcaaccattccaccaccaactacaccacctatggcggcaagaccggaagtgacaccagcagcgcttaaacctgcaacggaacctgccgctgatacggcaccaattgaaccacctacaccgccgaggccaccaacagcaccagcgactttcgctttatcttccatttccataccaacctctagacaaatatgactaacacaacaacaatttagacaattaagtctaacatatcaacacgtcagacctatttgtctaaattttttacgttaaatgtaaattgagaactgtacagctcagcacgcaaggaatacaaattccaaggttgggtaatgctttctcagaagttcaatggttatttcatatcgatatagaaggctttgcatcacaaagccttctgttctaagagtgcgctcaattatttccagaaatttcttccgtcgcctcctgacgcagtttctgggcatccatgccgtttagccgttcaatggccctgtctgcggcactctgacgatttccatcaacgtttagcgtgcttcctgagccggtgagtcgttccagatccagtgacggcacttcaggtaggttgcccgtgatcgacaaaatacctatccattcatccagattgacttggctccaatctacctggtttaactgactcgcggtcaaaccttcacagtttggtgacttggcactgccccaaccaaggcccaattgaggacgtacttgttcttgaataatccgtgaaagcggcgaagtaaagcagcaatatgattgccgtttctcaacacaggcacctaagaacttagacttgcagtaagagcctacgtagtggcaactcttcaatacccgcttagcgttcatctcaaactcactctgctcacatttccagataagctgaatgaggatcatggtgactgaataaatcatgtaggccgtcataaccgtactcagaaccgcgcccgcagcgccacccagcgcaaagttaccacccgaaacgacaccatcggctccaaccgcgccaccaacgttactaaacagagccgattgtgcccccgaaccaaaggtcgtacctacccattcagccgttttgttggtcaacacctgcatgaagcctgtcgctgcttgctctgctcccgcgccagcagccgttgatggcccagcccccatgagagagtcccatgcagacacaaagggctctttgaccgcactccaggtactggtgattggttccctgagcgtattccaggaaccatagattgccgaagacggattcatggccatgactgccgtatcaagcttgttgaccgccactatcatcgtgatgtagtccgatagcgacacgccacttggcttttcacagcaatccactatgccgccaacggcttttttgcactggccagcattacctttaaagaccgtacactcgacgttgtcttggccatcagctcccgtgcatgacatatcattggtcataaactgcgccgcattaagcatagctgcggcttctgcaaagttagcctgcttgattgactctggctctaaacaatctgtgcccatgcagcgaactggcccctcacagttgtattgagtttccattcgtgcattttgcacttcaacgctttgtccgcagtcatacaccaaactttggatatagcagaagccttcatgaccagccccgccttcagtgcattcggttctgacatactggcaggccgggttttgctccagcgcggcacacgtattggtggtcgtgttttgtccgttattgacgatggtttgagtattaccattggcatctacccagctatctgagctgcccatgttgaactctggatgagaagtcgaagcattgtaggtcgctcttgccctccagcatgagagccccagtccatcagaactgccgcgactggttaaatgagcaggagacgaaacaaccgccggataaaggcttcccagattggccaactcgccactaccaaccgttaacccgtcgattcgttttgtgcccgtatccaaacaccgccactgaaccgcagtaaactgatccgtttgcatcaagcattggtctatgcccggatcacttgattgatgaacaacgtcttgctctaagtatttgccagagaaggccaatgaagcgctcagtttcccaggagccaaacacttctgaacttctcggctgcaagtatcgaaatcgactttgttccagccggactcacatttggaacgcgtgacttcctgcggttcatgccacgaaataatcgacccattaacgaccttgcacaatgagccaaccaaggttccttttggacaggtcatttcagggtatttaatggacggtttcgtctctgtgaccgtctccttgttgcccttaagagagagtgtcgttttccaaccatttgccttagatggcgactcagtgatttttatctcagtattttgattatcaaaaatcctcagtgtcgcgtttccagtttgcatggtggtgctgtgctgtggaacaaaactgatgatttcagagctaaagcaaccacgctcaatggaccagctttgttgatgggtttcagcggatacacgtcgctctaactgacactgagtaagcgtgctgatcttctcgcacacctggtaatccggtacatgcttggtttcagtaaatggcgtaatcgtctgggtaggctcacaggcctcaaaactacttggcataaggttggataccacacactttggatcgctggtttgcaatccacagtcataggtatcggtaaaacgaatgcattcacctttatcattggtctcggcacattctgacgacatgaatccacaggaaggattcgcttcaagcacttggcaggcctggttttcaatccccttatagctttcatcatccacactcacttgaacacgccgacacaaaggcgatatgccagccactgggcttggggcaaagtaggattcacaaactgaaacaccattgaccaccgtacatccgttggttgaagacggctgatccgtgcattgaatactgtagtctgaaaacttcgccgggatatccgcggcttgttcgatacaggactgtggtgaccaactatcattcatcaccaccttggttggatcaaagcgcaccttgatgcgtgcatacccctcaccactacccgtaaccgatacgcgaatttttaccggcacttctaaaccgggttctaccgcttttagcctggcagtgagatcggtatttggattgcgctcccaactggtactgagctcgcagcgacctgccgtttctggtggaaagttattgttcggcccagaccagactttctgatcgccaagccacacttgcatgtagtcatcccatttggcgtactcaagaacggctgaggtaatcgcatcggggttcactactttgagtgtgatggcctgttcaaacactttacaacggccactccagtagttgtcgccaattcgtccaatccaaacttcaagacatccctcaccacaagagcgaaggttcattggtcctgaaacatgctcaataatgcctgccgtgtaatcgtgagtaatagtgcagctgttaaccgctgtattgagcctgtcgcattgctggtaatttgggctaccttcaccttgagactcacagcctgggaagctttgtgttaatagatttgggtcagtttgaaccgcatcagttaatgcccaaagcggatcattgaccatatctggccgagacctgtctttgatttgctgtagcgaacgaaatgcttcacccgtagcgccactttcggatgccatgctctcttggcgctgtgtccccaattgattcatgctggcatcagagccataaacgcccgttaagacatccaatgagccctgatccataccagggaaaagctcttgcaagttaatggactcattaccactgccattcggcaccgacaatgtattgccattgagtgcgggcatcgtccagttttgcagcaattgcttaccttcttgttgtccgcttaggccggattggcgctgtacatcagcggccacaccatgtaagggcaagcacgccatagtgattgataaaacacccgctaaaactcgggtaaaaagtgttggtttcatatttaacctcccgagttacagcagtcttgccagcgccacaaaatgtagagcgcatcttcaccggcaccagggattgttcgccactctccccatttcatggtgctttcaccgatgacatgcgcactttcagtttccggtacagggaagaacatactcatcttgtattgggatttcggcagcatgggttcgataacaggtcggcatagcgcactgttccccattgttcgcctagcaagaccacgcctgtgttgagccgcgattgcacgcgccgctaaatggctggtattttctgctaatgagccaaaggctaaggtgtggccagataacggatagagatggccccaactgccagcacaccaaaacaactggtcgatgggtttaccaagcgttgatgaagcagcgtcagcggtacaagcagatatagccaatggattggcaacggcagccgcttcaggctgagtaaaaaaggccagttcatcgttcagccatgttgggtccaattccgacaaatacatcaagtcaaagtccatgtaaccatcggcattgcaattgccatccatgaacaaatcgagcatgaccaaaagcggaaaggcgtaataatggtaatggtagaaagcaagatcaccggtatcgtattcaccttcaccatgaccaccttgcagtcgtctatcacctaacggtaaacgaatccctcccagggaaggcgaacaacccggcgttctgaccagttcaatcagacgcgctggctcccacatgctggtaacaatacctggccttggcacgcctaagttgtcttcacacaagcaaaatgacttgtttgatgcgccgcttgggacatttccagaaccaagaggaagaccggcaacccggataggaaaaatgcatgaccagcaaacatccgtcagcaacttgccggacaataaccccgcgtctgggcaagtcaattcggcttttgcaggaatagatgcgcccaggacaagcatgacaacgagagtccgcatcagacgatacgtattattgagctttttcatgaacaagctcctttgctggaatttcttctatttcaaacgcgagcccctttgcttgaacaaacgatggggtgacttgcaaatcaaagcgctgctttagcgaggcattgagaaggtaaaccggactatccaatgtcttttcgagcgcatttaggctattccaaccttgagtacggtcgagctgcgtggtgataagcgtaatgcggcgcagtgtcctatcttgcgtctcaagccaatgcgcaactgcgtccacttcttcagcgttcgacgcattaaacaccacaagctgctgagtaaacggcaaggcttttagcgggttaatacgcgttcctgctgggatcaatgttcggccattggcatccaatagtggccgctgcatgacgatggttggatcaaccgttcttatccgatactgcgtggctttgggtaagtcagtgaaagtttggcgagaccagaatcgctcaatggcttttttctttaacgcgcccaggtcaagcgactgtaaacgctgcatcgccacttgcatcaaatccggttctaaaatggaatgaatcggaccgcgttgacccaatgaaccggtattgcctgtttcaatttgacgctgcaaccagtccttgctgtaaacccctagtgcacttgcagtcaccttgtcatcttctatgcggaaaatggcaggcacgctagtcacccgccagtgcacaaaggctttcggatcgattcgaacctgaggaacaggatcaagtcccaccatcagcgtatgccaatcacggatagccgcccccaaggtctttccttcaggaattccccgaaacaacacaatagcgccggttgcactggcctctttaaatagctgcttcagtgaggaatcccccagtgaagacgacgcaaaaatcaaccattcatcgttgtgtttgagcgacgcaggttgttcaatcggtgaaaaaggctcgataaattcagatgaaccatccacagcactttgtaaaatgctgcggctcatttcaacgatctttttgtcctcgtcagacaacggataaggctcttgtgcccaggacacttgaacccaagccaatggagcaaccaacaaaaataagaggcatggtcttctcatcatccacctcctaccaaagcggccaagcgcgaccaacaatctgctcgcgcttaacggcattccaatagcgggagtcgaaactcgttgcagcctcgccggaaaaccaatattcgttttcttgcagcgtcaatgagcggctaaattgtgattccgccacaccaagacgctgggctaatgccatgccggtagagacttcagcaccgttcaccagcacatgctcaggcgtcacattgacttcatccccaggcatccctgttaggcgtttcagcatccgagtaccgtcgttatataacggagcgagtccttttgagtggaaggcatacaaaccatccttaacgggctctttattccataggtcaatcagatacaccgtggtatcaggcaggcagcgctcttgctgggtatcaatacctattctgtagcgcatcatggcgtaggtgcctaccattgccatgattaacgcaaggatggtcaaacggatgagatatggccgccaaggcattcttttacggagtatctgcatgagacacctcctttgagcctactggcacgaatacagaatcatctgcacccaccaccgcttgggcatccagcacgataaaaccggctgcttttagcttttcaatttgctgattggtctgaagcaacctagattcgatgtcttgttcgctggcattggggcccagtgacaacaccacctccccaaaatccacgactgcaatgggcgtacttaacgccaactggctgtggatgggttcgactgttttcattaaaagccaactggtcattaaaccgctaccagcaatagacaaagtaatagaggccataaatggccaaagcgtggtcttattcatagcctcgctcctttaacaactgggagatggcatcagcaacagaaaggcctttgcgcgttaactgcttaatcgcgtttacatcttctgcacgggacgagtacaacagcttgtgaaacggatcgacgataaggcggccaatcccggtgcccatctcggtaataaagaaaatctcggaatagacacccgtgacggtatgaaccgttttcaggtattcgtagccgccttcacctaatggcaaacggccttcttttttgagcgcgttgatggtttcggctttttggccaagcaggtacatattggccgagttttcagcgatggctttacctgtagggctgtcgtataaatcgttgaccgactgcgttactgttacagcactgccgccatattttcgaaatcgacggtaaccggtttcgatgaacttaccgacatcaccttgagtcagcagatcccaggcttcgtcaatgaacacaatcttgcgacgatcccgctcacctaagtacatctcttgttggatttggtagataagctgaagcaacaccacttgttgcaggtgcttacgccccttgagctcttctaactccagaacggtgaaacggtttttgaagcgaatattgttgtggccattaaagaagcggccatattcgccttgtgtcgtaaacggatagagctgctcacccacgtcttgcacacgacggtcatcgtgatttttcaaagcctctgccacatcatcaaccaacatcgcacgaccttttttctcccacagttcacgggtctgacgttttaggttggccatctgaaaatcggttaatgactgcgtaggtgcggccattgcggccaataacccaaccaacacatccgcttcttcgtcatagtcctcaacgatttcaaacggattcaagcaaatgccactgtcccggccgaactgtaagaactcaccatcatagacttcacacagcttttcataagagcggccaacatcaatcacccagcattggccgccttcagataagtaggaggagatgatttcgttcaccaggaatgacttacccgaccccgattgcgccgcgatgcaacagttgtaattactgcccgagtcataaagggacacactcatgatctgaccattacgggaaacaaagttaatcactggcgtgcccgtgcctttccaatccgcaaacaaaggcaacagagggatcacatgccgtgtcgccatggtcttgaatcgaaacaagtcgttcatcgcctggcggtcggcaccaaatggcagggcattcaagaaaattggcaaacagaagtacttgtcttccatcagctcaaatccgagttctttgaaataagttcgagcatttgaaacagagctgatggacgcctcttccgttggtgaaaacagcgtcaaagtcatatttgcccgaataggacgatcaccttcttgcaaggcttcaaaaagaacatcaaatccctttttcttggctgcaagcaccggcacaaacttgagcatcgggccataggcctgattgaccgcccattgacgcttcgtctctaaacgagatcgcatcgcctcagctgagggaaagtgaatggtgacatttagcaaaaagctgccgcgtaaaccgcgactgcccgtcatcatgtcgcccgcaaaacttgcggcatgaccaaaccagatccgctcaggcaggcgcttaaacgatagggttttaactcggtaatcacccagcatcagaccttgactatccactttgatagcccggtcataatccaacacttgctctcgaagtggcttatctgcctcactgcggattggtgatggattacgccaggaagcatcttttccccagttaagctgcgcacttaatgccgcgagccagtttcggtcagtcatctcagtgacgcgaaaaccaaccgttgccagcgcttgagagaaagaagcccgaagcgcggatgctcgacttaattcacgctcagtcggtataggactttccaaaggcaatttgcaggtgactatcagttgaaagttgcgtacctgagtctgggtcgattcttctatcggttgaaccgtgcccccatcgagaaaatccgcacgtttgcgtatcgacgccctgagtaatggatcggattgacgatgccgtaagcccatcatgcgctgaaggtcggtttgaatatcaggcgaggcgtacaggccaaattgcagcaaagtgtcttttggccagtcgttgttgagaagaacattaaccctgtctgcaacagactcatcaccacccggcaatgggtcacatagaaaaccaaagccaacactctggtcttccatgaaaaacagttgctcatcgtctgaataggccaatactggcaatagctcagaagcgcgttgccctgaatacagagaggctttcattaacgcccctccaaccaagcagaaagatcataaggacggcctcggctgatgcgaccatcattggcgacgatgaaaggcacaccttgaatgcccaggatttgagccgtcaccaaggtacgctgcattggttctaagttgcaggcatcatcctgttctaggttaccaatccggccattcagcaatgcatcggtggccgcttttttgtcacgcgcacagccaagctggcgaacctgacgctctgaatcaggaccaagcactggcacagggagtatttggaaggtgtattctttggttagcggtaaagcttgtttcaaaagctcatggcagtgcgggcatcgtggatcaacaaagaccaccactttctttttgccttcgcccagcgtcagtgggttcaaatcatccatttttaaaccaagacgacttaagtccagcgtgtttcccgcttctcgaatttcttcaaggctagtaagcggctttttcgaccaggcatcatagagcgtgccatcaatgacgaaccggccactgtctgacatgaaaacaatacggccattgctttcaaccgctttcatacccgtgacaggcaaagaaaccatgccgtcaattttgccaacgggcgacacttcagacactggttcagcttgaaccaaaggagacagcgcaagcgccagaataattggagatagttttcgcatgaggagtcctcgctaatgtaaatcgaggctccagtctatgcagttgtcctatgtggactcggttagatagattgaagaaatcgcaatctaactagggggcttatagctcgttgaggtttgttataaacgaattactcggcgtttgcgttaacaagccaatcatcaagcacttgcttcaatttatctaattgctcttgatgttttgcttgattctttgccaatttgttaatgttctgcaacttccaacgaatcgctggcaagtctgctgcattaggatagtcaaacaatgcccagtcaggttgccctcttttgaatgacataaggaaagcatgatccctttctgtgaaatgtttttgcagttcaattaacatcatgggcctaacagaggctaagtcttcgcattcaactttttcaaaagtcattccgtcaaattctgcctgaaatttctcatttagaggctgccagtttggcgacatgacttcattaataggccgagggtgacttaatgtataggttaaaaaacccaccaaaatctctctcgaaatcccttcactgccaagtaacatacggacatcaaataagtcgcgaggatgttggcgatccattgcagcacacaatttcccaccatacagatcgggaagactgactacctgaatctcagcataaccaaactcgtcttcaacagactcttgaactggcattatctctgcactatgcaatgtacctctggcgacgggcgacacttcaattttaattgtcgcaaccggacttgatacaacgattctcagttcatcagctttattatcctgaaatgccgctcggatatctggttgagtattgattctgtctgtaatgcgctgcaatgcagccctgacattaaccaaagcctcatctcttggttcaagtggaagataagcaagatcaatatctacagataaccgaggaaaatctctcacaaataaatttatggcggtgccgcctttaagtgcaaaaaccgtctctgtggctaccacaggaagcattcttatgagcaaggaaacctgtttgtaatatgggctgtctttatccattatgttgttcaccttttttgacgcttaatatctctggcactgtgatttgatatcgctcatcaaaacgtcctttttcgacaacctgccgctttcctgcacctaatttaattcttgtttcatctacgcgattgacccactggtgatcgtagtatcgacccagaaatagaaatattcggtttgcctgaacagagctgcttcgttcaagaatatcttgtacttttctaggactaagattgactaaaccctgaaataattctgcgacatgctcaaatgaaatcagcttcccaatcccgtctaccacttcataggcagcaagttctgcacagctgacagtgagttctttctctttaaccgtgatccttttcaaatctttctcgggattcacttcaagcttatgatttccacagtaaaaccaattctgataagggaattcacgaaaccattttggtaaggacgacttatttttaacgcaaatccaaacttgctctttgttcagctgtaaatagtgactcagtccttggtgagttaagctgctcaatccagccaaatgaactgaaacgcccaattgcacatctaatgcttgaatggcatcaacccaagttggctttatatcgccccgcgcatctggacgataatacacgccagaacatagcttctttagccaaccgttctgcgcgtacttttgagccaaggaatagctcacaccgttttcagtcagccattgctgaagtactagcgcaccaggagaagtatgagcaacaagccagtttatcttagatgacattttaacacccaaagtattaatatcacgaacagtataaaccatatagtttattatgaaagtgattttaacactttaggtattaatataccaaatactgtaaaccaagcccgctaatgcggcgttgttgaaatgaaaaggtctacacaacatcaccaataacccgatgttgtgtagacctagtttgattaccttaagtgaactgcctactgtggttcacattcaggtgcccagtaagacggcgctgattgctggaactgttgtgccaatgacttcttgagtgctggcaacaacaggtaaagttgcagacataacactttcaacgactgttggcgtattgtagagacccataccgccaccaatgcccaaggcaaaagccatcaagctttggcgagcgataccgcccacaatacccaccagtaccatggctcccgctacgatccgtcccaaagtaccttgggtccagtcttttagggtatcccacacatcggtgaaagcatcaccaccggtgcccgcaaatgagggctccgaaatcattaacgccattaaaccaagcgcaccaatggtcattaggcgctgagtttgaatggtgcgaactgcatttgtcattcgttagtttctccgtagatactcaagttatcgcgcttaccatcagctcccgctgaggcagaatcgctttgagtctgaagtggacgtagcactggcgaaaccgttcgaggtgctgacaccccaatatcccaccggcgcggttcaatttcggtaaacacgtagctggataaattcagatctccacggtcatcctcccaaggcgcaatccaaattcgcatcacccttgaaggaatgcgaataggtgcagattgctgcgtctcaggtaatgctggatggctcaacagtcctgtttctaaatcagattgtgaatacccagagggagaaccaattcgagtcgccacagcatcaatcgtcttgggtgcagcgccattactggtaagctcatagacttcacgcgcggataaacagcgcacaccgtcaggcatacctgggcatccatattcactactcccaagacccaatgaactacagccagacaataaggttgagccgactgccaataaaagtaatccagctttagaccactgttttgactggtgctttgggttgttctgcattgatgtcgtcatggttaactctcctctggatacacatcttattgtctgaaacggacttcgatcggttagcaacatgcaggattttttcatcttcttgcacctacaccttgtgaagtggccaacgacaacgaggccccacgagtgactatgacttcaattttccttgcagcgtctacctctatgactgggaacatattttcagccatgtccaaatagaacttggccactcgatccaatgctttacctgtgcctttaatcgcagcgccttgtaatgcttcttggctcatgacttgctggtacagctgagtatcaccggcattacccgtctgaatcgttggtacaggattcacatcaaatgcgccagccaagccctgaaggaatccggccatcatcgatttggccaccagctggccttgtttcgacactaatcggccacgaataccggctttgccgtcttcacccacggcataagaatccagtcgcgtttcaatgacgccaccatcttctctcacacatgaaatggtctcgcctcgcaaataagcacgctcagagctcaaatcaccgtaacctgcggcgatcaagaaacactctttgatatccgctctaaatcggttgggtaaaatggcttccttttgaatcctcagcaatgcaggaaaaggttcacgtcttgcggactcgtgagtaggtgcatccaaaccggtgatcaaagtacctgagatgatgctgcccgccggtagatacaaaggcggcgcttcttgcacaacaacctctggttcagcaaccacttcaggctcaatcatacgaatcgtgattggcggcaatggaacatctcgtgctcgtgtaccttggccattggctggctgctgatagagcggatcaggcagcggcgcattggcaaaatagtcgtctgggttagacggcagtggcctttcttctttaggcaattccatggcagataaaggcacttcgaaacggctatttgtgccttcaacagctgcatcacctccagcgcgaacatcatcaagttccgctcgaaggcgagccaactccgcattgacctcacttggtatagaaggcgaacctgggcttagccgtcctgaatcgacgtcacgacgcaagcgctcaacttcacgacgtaactgttcattgcgctcactgagtagttttacgttcgcagccaaactatcgaccccaacatcacgagtattggtatccgtaagaatgtgccggatcgtttcctgccggttacgactgcttgagccatcgtcaggattaggtgaaaacaccatcaccataaggatgagaccaccagcaataccagcaaccgatagaccccgcttcatgttcgggctcatttgctcccattgtgctttcatcgttattcacctcccacaagaagcgaaggtcgctgactttccaccgcttcttcacgatgattgcgaacaaccacatacaactcagtcttttcacccggcaacaagatattgcgtggccagtaagcacttgccactatatctggtgcatgacaggctaattcactggcttctatcggctcatcggcaaagctttcaaccagtcctacatagacggtgaagtaatgtcccgacacaatttgcccctgcttaaaaccaaactttaagcccggctgaaaacatttcgggcttgtgtcagtttggccagctaaacggatgtcatagccttgtggtaactcatttagtgcaaggcgtctgagtaagtcacgtaggttatcgacgtatggctgagccgtttcccaagtggcggcttttcggttcacgacgcccttaataggccactgctgaccatcaatagctaaggtgatttcacgcggtggaatacgacgaggtactaaggtgactgataatgcgggcgcttcctgaccaggcggagtgatgtaaagtgaaaccggtgattctttgtccgtggccacatatacaacattccccttgatttgcgtctgagcatcactggttgttcttacctgaggcgattcaaacggcgtcacaatccggttcagatggccaagtgctacagggatcagttcattaatccccggtgtcatcagcagcgttgttggcacatccgttgaagccgtattggtttgagtcggtggatttgcagtagcagactgcttcatcacactggctggcacaatcggcaattccacgtctgcatacgacgcttgtgataacaggacgccactcaagctaattgcgattaagcttggtgtcatccatcgactaattttggttcgcatcattcaccctccggttttgctcttgggtcaacttttcacgaactcgcttcgttctagcttgcccttcatacgtatccatccagctaagttttggacggtattgctcaatatcgatatcaaactcataggtgcgagtttggcgctgctcatctccagatggtccagagaccaaggaataaccggtcacaaagacatggccggtttcatactcatactccacttgtctgggttggaatttgagcgtgactcggtcttcacggatctgtcttgcctgaatctccagtgcatcgaccacttgctggtacaccgcaggtgaaagtagcggctcgatagcaacccggataaaggacacattgcccggcgtcacgttgcccataagctcagccaggtagagtccccaagattccaggtaaggctgagtggcctggtttcgtgacacttcagccgtttcagacaaggttggtggttgaatggccaccacggtattgcgagaaaatgccgctaccgcaagcagcaagttagatagcaccagcaccgcaatcaggaaccgttgccatcggttctctaattgcgtgccttgccatgattttaaaaacacgtcgaacttcacggcagatagctcctgataaatgggttagggattgtcttggctttggttggcaacagcccggcccagtagatggcgtgaagaataaaaccatctgggcgaccatcacgaaaacgccgatagagcttggttgtcaccaaccccaacaggcataaaaccaaggcattaccggtaaaaatgccgatcactagccccaacagaatgggagccatctcatcggcactccaaagcaggaagtgcggcgggtcatcgatataggacggaatactcacaggttccatagtcactcctcgttgtttgaattgagaagtgaaggatgccttgggattggcaggttcagtggtcagctagatgccgaattcttgaaggttttgagggttctactcagacaatactaacaattgatctttttgatgcggttgatatgatggggatattggtcgtgtcgagaccagctgcccactttagcaaacccggacgggacgacatgcatatcaaatttattttttgcttaggttttttctgcgacctcggcagtgggcaccgtattcgctaataggagaaactcaatgcaaattactaaaatcatttcctctgccacggttgaacgtttaaagcaaaaagcacgaaagcttaaacgtgaaaaatctattccacacactcaagcactcgatgaaattgcaatctctgttggttttaatcattggcatcaggttgtacaagctaatgacgtactgaaaccaacagaagtggcattatcttcaggatgtgtcatggcttttgatgtcaaagatggtatggatgtcgataccagtgatggaattttaattgaagaccacttcttggagatgctcactgaaaagcagctattcgaaatttatgccaattcccctgatgaggacgacgaacaaaacaggccgctaaaagaaacgctatcggattcagagcttcatgagtattttcgagattattgctcattcatgtacttccgtcttgccgagcctcatgcaaacaaaccgctgaaagaagtattggctcttatacgacagtactcgttttggatgccgcaatatatttggcttcaaggccaccttattgatacttaccatttgcctgctgaagacgagaacggcaataccgtaggcgtgaggttttagctctacaagatgaggcctgacaggcctcatatcttcttctgcaagtgacttaacgccaaccctgccatcaatgccaagccgatgatcagcgacggtagcaccaacggtggaatagccagcggggcgaacaatcccataaacagcaaaatgacgcctgagcccaggataatcatgctgtagcggtgaatgatagggctcgaaaaatcaaaggttgttttcttaatcttccaggtcattaagccgtcccacagtgccggtaacatgagtataagcgcaaagggcaaccagaccatcagcaaagcaaatcgagtgaacacttggtacaacacatcaaaaaatgcctgaatacggtcttctacccatacaaaccaaaagcctcccatgttctccatccctttagaacgaagtcgttgttcttctgtggggattagaaaatcacgcacagattgctccatctgcgtatccacaatccatgactgataccagccatggctagtttgaccaatccaatagcttgtttgtgcgcccaattggttttggatcatctgcttctctttactaataacccggccagtccaatcaccaggcactaacacgccaatggcaataatctccagcatcagtgccagacacagcagccaaaccgacttatgcttgctcatgccaaacatcctcttctactcgggccagcatggctgcaacggttggcgtcataatccgggctttaatcacttgttgaagccgctttgtcgatgtatggccactgacataacgcacctcgatgcgtccttctgccagatacgccatccgattaagacgattacgaatccaggtgtggaaatacacaccatccacggcggcccactcgaaatggtcaggatcacgcaggcgaatccccgttaaagcactggcggcagtccaggtcagtgcctcaatgaaatgccaaaggcgtacactatcatcatcacaactgacttcttcataactgcccaagccattacacagacacaaatcaaagatggaatggccatctaacgtgaacgcatccgtcaagtagtccgccaagcaatacaccgaggccaaagcatgaggccagtctgtttcaagcagtcttaaggtttccttgaactgggggttatgttgctgccactgagcgagcatttctttactggtaagtgttgtcattttcagacagacagaatgatgcatacagactccttatgctgcctgtgtagagctggttaaaataggaatgcggcctttgatcacgcggccacctgaaagcttggcgatgtactctaggttggggagctggcctaataactgcggtggaaacatatcgccttcttcctccatcaagcgttcgccatgattgccggtaaacaacgcggggctgtccgagttggacgacataccttgagtttgcataatgtactgcaaccgagtcttaggcagattgtcggtaatgtactgctgcgtttcggcgtccatcacccgaagggctatcaggttgttgatgttacctaacacctggcgagccttagcttcgctgcctgtacgagctgcaaagtcagcaaaggtctgagtagcaatcacgcaacgcatttttgcgccacggcctttgttgagcagttgaatgaagggatcgttgacgacttcagccgcctcatcgatgaagatatttacgggacgattatcaacaccatagttatagcggtcaccggccacggcggtgagatcggataaaagcaacgaaccgatggcgctgccaaccatggcgtcagtcaatgaatccaagccgatatacgccacttgggcattgttgataatacggccagaatccgtaattaaccggctgtcattcacatcgtttgcaatcggtgatagcagtgggccaagttcacttgaagtgagcatattgagcaccggcatcagtgaagccaccatcttggaatagtgggttctgtcatgttcaaacatgctcaaaaggccttccaaatcagtattggcggcaacgggctgaatgcgttcgtagtaaaaaagcagcatcgccatggcttgtttagccaaggtattggccttttcagtaaagcgtttaatctccacactaaagttcggatacacctgctccccccaggctgtgacggcttttactaccaagccctctgggccaccttccaagaatcgtctcagtgttttcagatcaggacgctgtgaagtaagcaacaaaccttgcacgatgttgttcagtgccatttggccaaaggctttaaatggatcagcaccggtttcggatgggattaaggccgcaattcggctggcaatttcagtgccccggttaaagtttctcaggggattaagacgtactgaatgctctggaaaacccggatgaaaatacacaaagcgctcaggactaccggcggcaatacaggctcgctgtgcattatccttaagttctttgtctcccttggggtcaataattatcacggcttcattgcgcaaaatggcctgagtgatcatcgcatcaaagcatcgggtttttccggcaccggtcgtaccaactattaaggtatgcccctcagtgtgaccaactggctggtacacatcttcttctttgggctcgacaccatgaatccaggtcgaacccatttgcttgccgtgaccttggttaagcaaggtttgcttatcccgctttaagatttcataagcacgttgagcatggcgttggtcccactcaaagccataacctaaccacaattcatcaggatgttttgccattaccttttgcaaatgcgacagcgccataaatgccaatggtttgccttttagccccttctgcaacttataaagacggtaagcctcaggcaggcgatacaacgccatgcccgaggaaatccctgtcatccaccaaaatggttcgggcggtaactctgtcagcatttctgcggcaatcgccccagtggccccaaccagccaacctgctgctgccatggcctcatagttcgtgcgccagggcatttcgtatgcgttttctttcattcatgctccgcaaaataaccgtttgcaatccacttaagttcaaatggattaacgtttagcgtgagcggtaaacagaaccgtttccccctcatcaaactggcattcgtcactggccgagatcccccgaagcagctgtccggctggaatgccatgcgcattggcgacttggcgtaaggtttgaatcgtgacgcgaataccatcggcactatgatccacgtctgggtaatcaccatcggtcagtaagatgggcaaatctttcacaaaattaaccatctgttggcgctgcacgtatttggggtctgtactcgatttcgcattgggcgcaatcggcttttgctttcgctccgctcttgtggcgggctcttttgcttgggcattagttgtcttagttcgactcggacgctgtaaagcctcttcgttctgaattgctgtcgccggttctgtgtcttgtttggagatgtctatcagtgcaattagccttttagaaatcgataccttcagaagtaacccttgctcctgaacgccatcattcgtagtcacagttctggccttacgagtcgggtttgcaggatctagttcaagccagtctaatcgactgagttcagcaagcagttttcgaggagcacaccaaggccttactgcatcgggataacggatcaggacttgctcaccaaccacaaccaacgcactgctggcctctgggagccacgccaaagattcaggtagattcaatgctgcttcgttttgctgatttacgttatctgcgatagcgccatcatatgaattgttaggcttttcgcattcatcacctggagcattttcagttgcctgggggttattaacatcactggcatgacgaagttcatcatcttgttcggacgagtttgtcgatggtgactgtgccgaactactatgttcaattgatgatgacgcttcagacaagcctggatgctcactggaacgactctgaggctctgcttgtgtttgttgtgttgcttcccactcaggtttactaaacagtgtcacaccacttggtacattcgagctgaacaataaatcggtctcagaaatatgcagcatgggtaaccagattggcttgtcgtctttgatcagcacttcaggggcaaggctttcatatcgctcatttgagccggatttagtggccaatcctctctcaatgaggatgtccgcaagggtatcgggatctcttgggatgccaggtatcttgtctttggccaaaagctcaatgatgtccttagccgcgcttttccagaccaggtaaagattggttgattgattcgattttcgtacccagactctcgcatctcgctgattgaccaaccactgggaactggcaagcaatcgcctcatggcatcaagtaaatagcgttcgactgggacaccaagggcattgtcgtcaacggaaattcgttgagctttcaggtctcgctggacactggtttggtcagcttcaataaccaatttagacaggacatgctcgggatcggtattgccaattgcttccaacatggcttgcaaaatctcagggcccggctgggttaaccaggcgagcaactcaggtgtcatcacccggtttaacaccagaattgaaaattgctcgtgccgcttgcaccgtccgtcgcgccagcgaatgaaatagcgttcaatgcggttattagtggcccactgggataaggtttgtaaaaaagggttccactgatagcgtccatcttcgtctgtgatggacaaatctgaaacaggcttaccaatatcatggaacaaaccgccaagagccgccgcaacacgccaccttggttcaagctcttttttctcaaccggtgtgccactggcaacaaagatgatcccttcagcagcttgtgccgcccagaaagcaacttccaaagaatgacgtaataaaccaccagcgccactgtgatgatgatgctcagaagctggcaacaaatgaacataagcagccagatgatcaatgcagggctgaattagcctttgaaaatcacgctggttaaagccaagtatctggcgcagtttggcaattagctcgtcttgtgtggactgcaaatcttcaggtgacgcagctggcaaccccttcaggaatggcgggtagcgtggaatttccgcatccagttgtgatgacagctctggaagtgctttggcttgaaaaaataggtttttgaacatagggaacctccgacacgatagtgtgaaggttttctatagctacctgagtcaaaatagataataaatttatgcaactattctccctttacttggttgttgaatagaatggaaaatcactcatatggcctttcgtgagagaagtactccaccacatacaggcgagatatccaaaacatggcttcacataccctatgtgaagcacaattttaaacaagctcaaattgatatctgggcaattataaagataactaaatcaagtaagggcttagttgtcctgacgatgtaacgacgagaccctttattgctcttgttgcagcaacgtgtaatagcgctctttcgttgaaatcgtaatcgcgtttttcgacaggatcttcggtaatagccatttgcaatgggatgacaccttcgtttgcgcctgcaatgaaaatatattgaaactcgagccctttaactcggtgcatcgtagcaaaacgaagccctggtttatcgttgtcagaactctctgaagagagcgagtaagaatcgaatccagcttgttcaaaagcgcttttgtagttgtcacgaagtgcgttcgttcgcgatacaatacaaatattcttcaacggcacaccacattcaataagcgattctatctgcttgcgtatgaagccacactcctcatcgaaactggtacacgcttgcacaattggcaaatcaccatggaaaagagataaatagtcactcgatttatcaaagtcaccatcaagatcatcgactggcacattttctaaaatagctgtggcaaatcgacgggtttcctcagtggtacgatagttaatctttaacttttgagaacgacgtccacgaacattgatgccgcaacggccaagtaccaccttattgcgataaatgcgctggtggccatcaccaacaataaataggtcattctcttgttctggcacgatacttctcagtagcgtgaaagcttgactccccatatcctgagcttcatcgacgatgatcgaactatatggaagaacgagttgttgctcattaatgagcgccatcgcgtctaacatcgcatcattaatttctcgaatttgatttcggttaagttggtttcgatattcttcgaaaacaggccaaacgagagagcgctgcaaacggctcaatgaggtacctcgcccaacacggcttacctttaaatactcttgcttggttttaatcccatttgcttgaacaatcaggcgccattcttcttgataaaaagaatctgggaaatacggctcggcaggcgcttggctaacagcgatatcccaacatttttttcgtttagcatcaccctcatacactactttgtagtcatatttaaactgcttcaacagacgagaaacccagccatcaatgttgacgacttcaattcgtgccaattgttcatctgttgctatttttttgatgtttgctttaatatcagaggctaaatttttggtaaaagtcgttaataagatcttacgattactctgttctaaaataagcttcttcgccaaatggacagcgcgatgcatcgccactacagttttccctgtccctgcaccgccgagcactcgggttggacctttagcctctagtgcaaccaactttcgttggcttgggtgcaagaatactcgccattgttccaacggtgcattaagcatcttttggagttcaaggtcatcggtaaccactttgaaagagcgcagagtaacggctcgttgcaacgccgcatcaaagtcttctacatcaatctcaacatcgccattaatttggtcgttataggtgttataaacagattcatagtcgtctccagcggccaacataaacaatgcctcaaaggcttcagttggcaaactctcttccaactgttcaagttgtttctcagtcgcaattgacatcacacgttggataaaactttctggtacaccaagcgcgagaatttgcttttctttaaactgtgcaaaaagtggtgagttttgcgaagaaatcccttgtgtcggctcaacaatctcagcttccacattagaaacatcaataatctgaatggcgcctgttgacgggtgaatttcgcagcgatgagtacgagcccaatcataagcatcatcatgcaaagcaacaaacatcaacatgtaaacgttgcctttttctggtttaagaacaatgcctcgataagcttgatcgattcttaccgaatgcacattcttacttttcgcatcacggattttttcataattaatcgcagagcttgtggggttttcacgaaacttgctcaaaaactcttgcaccttcttttgttgtgctttgggaatcgcagcaaaagagagcaaaaaatcggatgcaattgcaatttttggagtatccatacctgacattgtggttacctatcattatgttttaattttaaatttagctgctcaaagacggtttcatttaatgcgccaacaatgacgaaccacccctttgattcaaatagatctaccgcctcttgctgctcaggcaacaacaaggcaacttgactactcggccaagccaattctgcctcagccaaaatttcgccttcttcgcttgttaactcatagccaacctcaggagcactgagggattttgccatcatcgcttcaataacctccggctctagcagttgatgctcaataataagctgccattcttcatccgctccgcccaccgaagatggcgaatttacggtaacagaggcggtttgattcggcatcagtgtaccgtcattcacgtcgtcttggagcagtacacgggaagtgcaggaaaaatcacgcataaactggccgatattcaccagcttccaaaagcccgcgaggtacgcttcaaagtgctcatcgtgaatgtcacgatcatcaaagcaaatgtgcaaacgtatatttgcttcaacatactcgaaaggtgtttgacctttcactgcatctttcagcacataagcatatgactcaacaggaaaaacagttgcaatttccactaacctttgtgaagtgccaactgaatcaagtaaaccaccgaacagatatggcgtatccatacagagttcgctaaagcgactcgaggcgctattttcacgcatttcgtattcaaacttcgctttcaccgataagtctcgtgacttattgaacgctagccaatagaagcagttcgccgtcgaagcttgacggaaaaatacggatgtttcgatgggttgatgtaaccattttttcagcaaactaaagttattttccccttcataaacgctgcgcaatgtttggtaattacgctcgatgaacttaggatacaacgcttctttaggttgaatttcttggcgatgcaaaccaaaaaactctttcaatttactcttatcactttgaacaatatcatgccagcctagtgtccacgtgttatagcgcccgctatcacgcactgcattacgcttagctacatcgtcaaacactatttttttgtggaacgcgaaaccatcaagataaatggctaaaggtttcacaccagccatctgagatgcgggatacaaaacaaaatcaggacgagtttctatataaacgccgtcgtttgaaccgagttcgacttgcggaaccaaatgccaagagacatcagagttaatttttgacgcgataaaccaagacgagcggttatggaaaaactctttggttaccacaaactctttggcaagccctttcaaggtttcaataaatagccgttcaagttcagactccactacgccatcaatttcaatatctgaaacgctcttaatactgatcagcttgtctttattatcgatgatagctctgagcaacttacgcgcatgttcacgggaaattgagcgcattttgttgcgatcacggtaagcataaacacagtggtaacaaccatccttaccttccgaggcgcaggcacaatgttcaatgacctccagcgccatcgatagcagggcgattaggttgtcaggctcctgcattaattctttaagagcccctgtacctccaggcactgaatcataaatgactaagtaataacgatagctttcacctgcatctgccggttctttataaatcgtgccttttagatgatcgacactgcccttaaagtattttttcatccccaattgcaacgcagcagccaaagaagactccgtgacttcacctaacccatagttactcacgggcaacaaaattcgaatggcctcagattcaagctcgcgataaagatacaaaacgtcctcataacgcgcctcttcaggagaatttcggtatttacaggcgatttcgtgcgttggttggccatagtttttttgtacaaagccacagtcactgcacaccttaaagcctgttttctttttcttctctcctgcaacgtagaactcttccccttcatcagatgcactaccaaagttaatatctcgcaacgtcactcggtttaagaattcaaaaccaaaaggcatttctttattaggaatgtggtaagcgtaagcgacatcttgcggcatgaagttcaccaacatttgtcgttggaaaaacgctggagtacgagtgtcagcatcgtcagcaatttttgagtcacgcgagctagaacgcgcataaacctgtctgagtttcagcatgcgaattttctgctctgcatccccccaaccggaatggccacatttgggacagaaagaatgctgatcggcctcaatgcgctcactatagttacagtggctacaaactcgccatgtctcaggctcagacaccttcatgtcaatttgttcgatttcaactttatgcccacccgcgtaaaaatggctcgttggtgcaagctcagaaagcgcggccgctgccggacgctcgtactcaaaggtacgtgtcacgtattggcttgagccatcttccgtttcaatggtgtcctttttacgccaaagcactgagcgaagcgtaacgcccgcttcagggaatgcatagttcggcagtaagccctcatccgtcataaagttgagagtatttttcccgttaatctctcgaatcagcgccaacagcgcattgcgctcgttttctaactcattgagttcagattcaaaattgaggtctttaactggcgacaacttcaatttatcaatactacgtttgagtttttcggcgcgactgcgcaacgatttacggtcagtcgccaaatggctcaatgactgctcaattttgctttctaagctgtaagcgacattactgccaaacataaaggcacgtaacttatcaactgagtttggcgataggctgtggaaaatagagatgaagagatcaaacaactcctgctgtttacctttaacaaaagtgaggaaattgtatggatatagatcgcgctggccactttctgtcgcatccaacatctgttttactcgcttaggaatcgcactactggtcacacctgttttaatccaacggtccatacaaaacgccgttaactgacgttccaaaatggccgaagcatcaagatagacacccggtgcagtgacactgcccgccatcatttccaatggttcttgataataaaaaagatcgtgcggattaccttctgcgacagtcatgttaaaggcattaccgtcctttcgccctgcgcggccgatacgttgtaaatagttcgcttgcgctggtggtactgagcaaagcagcactgatgacaatccaccaatatcgatacccatttcaagcgtcggcgtcgaggagagcaagttcacagcccagcttgattgccctttgataaatgagttttcaacttgttcacgcacatcacgctcaagtaagccggtgtgttcactggcattgacacggtgtgtttgtgcaaaatgccactctttttccgcaagcggcagatcgcgcgtatagcgcccttgacagcaatcattatgacaaggttgagcataccaactggcataggcagttttagcgaccaccaaacgttcggtacaacggtcacaaccgattgcttgtaaattggtcgtcagcttaagactttcaggttgcaagccccagacttcactacctttgacatcaaattgaacaatgatgcccgctttgcgtagcgcatgcattaatcggctataaatcgtctgggtatgcgaggagatcatcacgttgtgctgattacccaaacatttgttaagccaggtttggtaccaactgtggtgatgtttagaaccaaacaaattatcaaagcgttggatcttaccaaacgacaaaaattgaggggtgcgcgttctgtcactccagttgggcataaatttcgaagttaggcggtcaattttagttagatagtaggtttcgccagcgtcttgaatgtagtgttgtaaggctgaatgatttatcgcccctttcaaacgcatgcggtgtagtacgcccaaacagaaatgcagcagatgttgatcgttcactccgctgaactcattccccagttcatcaaccagttcagcatgcagctttgaacaaagtgcgaccaattcatcactgcacacatcgacactcacctcgccagtgcgctcaagggttcggccaatcgctgctcgcaagccaaattctgaatgcacttcccaattaagtcgtttcgccactaaatctggcaaattgctattggtgggtaatgtggcggcatcgtttccttccaccagctcgcgataatcgtttaaccattccatattcggcgccgtaaacgttgcgacaaacgattcaggagtcacgagtttagcttgggcttcttgtgtcactttcgtggcgaagctcgccagatcaagcccttcaaattgctgcgcaacggtggcgatatgtcctcgcaccattaacggccaagtacgtgcagcaaagaaacccgctcggtgagcggcgtcttggaccgagtcagagaaggtgatgagttttttattgtcgttgaaacggctagcataaagctgattgatagcaacactcgacagtgtcgcggattgcgcaccaataatgctcaggccatttttgctatgacaataagggcactgattgtcaaagtgtgggcctttagtttcggttgtttttaccaaatctgggataaacacacggatcagtgcgtcttgctcatgaccacagtggatcggggcgctgtccgaatttaaggttaggcaggttgggcaaacgcgtcgaataagccctttggccggaatatcttcaccttcgttgatggggaataacacgcgcacgccttgatgacgagcgaagaacaagcggtagaacacctccaaatcgttctcgagctgatcgctgtagccatcgccataactaccccaccctgttgcatgacagtcacggcagtggatcactggcatatgttgctcgccttcgtgaaacgccaaatcatcactaaaacgcagcaccggcttcggatggatttgtgccaccaaacggcgtagctcgcgcagccaaatttggtaacgcacttgcaaaaatggcagcacggggcgcgctttgcccagtgcgattcgttcttgctcgacctctggcggttcatctatccctcggcgcgctatcgacaccaaagcaataaaactctgcaacaactgcaacgtggcttgatatccgagtgacaaacttcggtcgagttcattcaccagcacatccagcgcgcgaattttgccatccagcaatcccagtagtgaatggaaaaactgatgtgtaagcagagcctcccctaatgcgatgcgcacggctcgcccttcatccgaatcgagatcgtctggcaaggctaagttatgctcgggaaaccacagcgctaactgctgatttaaataggcgacttcatcggcgaactgagaggcatcaagcaacgagagctgctcataactcggtgagttaaacacttgtgcttgatgagcctgtaaatattcatcgtggcgataacggtcttctcgtaccacggcgctttcatcaaacggtgcatcaaaaatggtgctggcgtattccagcaatggggctaaatcatcaccgacagtcgctgaggtgccaacacacgcaaagccttggttatccacgcttaagtggaactttaaacggcggatcaaacaagccaagtccgaaccttgagcgccatcaaaggtgtgcagttcatccaccaccaagtactttaatgtgcccggttggttatgtagccacagcgattgatcttcagggcgcatcagcaaatagtcgagcattttgtagttggtgagcaaaatatcggggggggtattgcgcaaatgctctttgctggtgatcacgccatctttactcatgacaacgctgccttgaccatcgccaccgccaacaaacaagccgaccgtgactttgccttttaagcccgcattgttgtacaccgtttctgcaaaacgtttagcttggtcagttgccagcgcattcatcgggtatatgacgatcgctttcacccccggctggttgcttgctgcacagtgattcaaaatagggtaaagaaaacattccgttttacccgagcccgtgccggttgcgaccaaggtggcctgtgggttgtcaccaccaaggcgctgataagcaaccgcttggtgtgcgtagggcggaaaaggtaagcgtacttgcgaaaaaaaattcagcgccagcgcgctttgccgaaaaggcaactgaatggataaataagggcctttgaccagattatcgcgctcgtttaaaaagctatcgatcatcgagttatcttcgctttcaaagcatgggctgttcatggtaaaggcggattttacgtattttttgacgctgcttgcgacttggtcactcaccactgacggtaacatggtttcactgtcctttttgcattgttttttgcattcttttctcgcgctgttttctcgcggcgctattttctcacgatggtttctttcgttattctattggctaaatgcaagtgattcggcggttcgagcgccgtggtcgaagcctcggcgctcttgcctacattattcagcgaatgtctaactgagcttcaactaggcaaaacgctcactaaacaccgcccatgcggtttcgtagtcttgctcacggtcgcacttgtcgaatggggcgatgtattcaatagtgcgttcaaccggcccgccgggttgcgtgtcatccatgtaagttttgtaaaccttgccggatttcagttcgcgaatatcttcccaaccgagcgctacattgctctgcgtccacggctcggctgcactgccctgcccgctggttttatcggcaaacacgccatcttcaatcgagagggtaaacccgtttttcttattaaacttacggtctaaacctacgcccaccaaaccttttgaggcggtaaacacaatacggccagttcggtcgtaccaagtatccgcctcgtattgacgcattactgggaactgaacacggtagatggttttgagctcttccaaagtcatacccaacgccattgctaccagcacatcgatttcaactaaggcttggcggcgtgcgtaatcggtacgtagtgcacaatcgcgacgccattctgcggttaggtttctaaaaaaacggttgggaagacgagaatcctcttttgcccaagtttcattctcaaactgcgctttaaagcacttaccccacaactcttgataagctgttgttaaagcaaccaaagctaaagagcgcaaatgaatagccacgcgataaatatcatttgaaagaactggtagctgattgatcaacgttgtattagcatgccccattcctgtacttttaacgcggtaatcgattggaacagataacgtcataccgaaataatccaacaagtcagcatggcgtttaaacaccgttcctaaacaagtgtttatatggccaaccctttttggaattatcgttgagatcattgttcgctccgaagatggccctatcatttcacgattcacaaatcgatagtaatctgtcacgggtcttggctctggcatttcttccggttttgcacccttttcctgccatgcggccaaatcggcttcatctatccaaggtactttgggggtacgtcgcagatattctgcttcatcgcaagctgggacatagttggtacgagggaggtagttgtcaggtatcgtttggagatcgacaatatcgtaatgccctttttcggtacaaattgctcttggcgttttatagactggcgtgcctacataaaaatgtgggccagataacacaaaactacctgtgtgatcaggatgacaagtctgtcgttctattgttccgtctttttgggcgttcacttcgttccagtgttgagtggtaacgaaactttttcttatacaggatagttttttcggctgactggctaatttttctaaaacggacagtaattgggtagaatgtaaagcaggcaatctggcttcaagcgaaggggttccttcttcgtcataaagttgagaaaacaattttagtgtatcttgatcaataattaataagcgatttttatgcccactctcatcccagttcccctcatcattcttaattcctcctactattcctgagccattatggtggattgataagtctaatgtttttggtaaaaacaagttagacacgttgataaaatcgacggtgtcattctctcgggatgtaaatatgtttacgctatacttatttcgatgccctattggaaatagcatatgttgattttgaaattgagcatgtagccgcaatcgtttataaatctcagctctcaacctaccaccattggggtcgtcatatacaccttccggatgcaacaatcccgctgtgccatttttacttccaatagaccaagatagtggtaaaaaacatttatatagattcgctttactacccttgagctcaggatagttcgccaaactatttagaaagttttgtgttgctgatgcttcttcatattcagaaaaatacgcatgttctagcgcaggcatctgtagcagcatttcttcacgtagagtatttagcttggaagcggaaaacttacgcaatacaaattgtggctcaaaatcacccataatgccgctttcttgccattccactctcaaccaaggtgggttaccaagaatcagatcaaaaccgccgtggtcggcaaaaatatcggcaaattccagttcccaatggaaaaatttatagcgcgcggccagcttatccaccagcgctaaacgcgggaagaccatatataagaagtctttattgacggtaccgctgttattggtggcaaacagatcttgcgtttgagactctgccatttcatcgaacatacctagttggccagagccagattcaacaagattaagacttgctgtttctgcatagccttcgagtacctgctcaatttcacctaggtattccgcgcggcttggcagatcatcggcactctccattggccaaaaccacagcgcacaccagtaatccatcaccatttttaagcgcgggtaaacggctgaacctgactgctgtgattgactcagtaacttatctttatcgttggtacttgaacgctgtgctgagcgcgcggagtttggccaaatttgcaggttatcggtggtgatattgcgctcttttcggcgctgctcaacatgcgcttgccatagctcatcaattttttggcagatacgttttagctgatctttttcttccatgctaaacgagcgaacaaaggttttgcgccatgcattgatggtggcaatttctgttggcttaagcgcttttaccactttatcactgtagtttgccataccgttatcgggcagcaggtagtgataaacctcatgcggactgcgcgcttcattatggcctaaacgttttggctcgatgtttaaccagcttgggtctttggcttttgtgtaagtgaggtcgccagtcgaaaacacctggcggcgtgcgccaattaatgagttaccattgtaaagctgatagccaaaccaaggtacaaaggcttcatcgctaatggcgttaagccacagcgagacttccgccagctcgacggcgacggggtttaaatccacaccgtaaacgttgttatcggcgatgtacatttttacccgttgcagctctcgggtgtattgctcttgcggtatacgggtatcttctgccagttgttttaactcaaggtacttttcagccagctgatttatcgcttcgttcaagaacgccgcgctgcccatggctggctcacacactttgatggtgaggattttatcggcctgttccgcaacggttgcgaggggttcgagctgctctttatacagctctttcagcgcatatttcaccaatgactgagtgagcacttctggggtgtagtacgaggccgatttttcacgatctcgccccgccatgcggtaaataaagctgcctttcgggtggctgagtaaggtgccatctttgcgaaataccttttcatcatcttggtattcggccaactgctcggcactgacaaagtagcctgtttccagctcattgagctcttccccagcttttttcacttcatataagtcggtttgagcaaaaaagccacggtaggaaagcaaggcttcatacacggcgcccaactggttaatccccaactgcgcgtaagagatgcggccacgacgcttgcctttgccttttcctgggcggcttaacgacattaacttgatcacgcgctgtaaggtttcgttacgaaataccacacgcgccaaatacggcatacgcgcgtcatcgaataagtgactttcaagtttgcggatggcaaaacttttctgaatatcatcaaataagctgctctcgctatcgctctgtttgctgttgccagcaaagcctttggccacgagacgaaatagcatctgcaagctgtcgtgaatatagcgaccattgcgcgattcttcggtagagagatccaccatttccaaatcgcgtagtgcttctaaactgtaccctttgaggtagacatcggagtttgtcggtgcgtattttagctctggccttgcttcgatatagaacaaaaacagcatgcgatacatgtaccgtaagcattcaaggcttagttggctggcatcaatgttgtttttgccgtcgtaggtaaaccctttttcaatcagctgttttgcggcttcatcccccaacagctcaatggattcacgcagcgcgtacttgagatcttcggatactgaaaacgcatgcttgtgtgagctttcatctaaattatccagtaggttctgaccttgctgtgggcagatggaatctttatgcaaaagagcagccatcgctttgagagtatcgctctctttacgaccaagaatctcttctaaatcaaaacgtaacaaacggttttgcgcccacttggtacgatctagcaacaagcattggcgattgcccaataacagcaaccagcgaggtggctccggggcgctaaagatttttttcgaaattaagtcctgccaactcagctcatcaccttgctgtgtttttaatagaaccttacgctgttctggttcgagtgcttctaactgctgtgataacaggggcaatgacagtgggtcagcgcagtcatccatggatggatcatgggcttcgaggatccataacagaggcaaaccttgatggtcttgataagccgacaaaaccggtagctgaccgttttctagcaagacttgtgttggttttatctcaaacccgagcgcatgcaagatggggctccaacgcgcacgctgattactaaggcgtttgttgatgtctttaacactgagatgctgatttaactcgcgaaagtactcaccgctataacttgccagctgggtgtgaggtgcacgatagccacgctgcggtttaccaccttgctctttttccgcacgttcaatttcgcgggcttggttttctttttctaaccactgttctaatacaccacgaatatcaccgacaaacacttcgctcagataatggtgtgagtaaaagtcgttttcgttgtaaataccaaccaatgccatggttatagcccttccgatccggttaatactgccaccagttgaatgtatggtgaggtttctgtggtcatggtgtcctcgatccagcgtaaatattcatcgaagatctgttcaatttcccgttggcgctgtgcttttttgtcattaacgattttttctgcttgcttgctatcgccaaagtccagctccaattgcttcatttgcttatcgcgtaacttatcgagtttttccatctgctgattgagcttttgatttaactcggcttctttttcattacgaagttgtagcaagtatgggcgtactgcatcgatcgcttggcttaaaagcgcttcttggcgctcgtggctgcgttcaccgcctttattagacagcacttgctggtggaatgggtaacgctgaataaagtcttcaaagcgctcaatgcccgtgagttcaccgtcctcaaaactgaccaccaaccatgggttgactaccgggtgtgatttacggttcggaaacaagccagaaagcacaaagtgatcttcatagctttcgaaaagtgcaggcatgcgcagcactggcgcttggtggcgaccaaacgcgcccatcattttatcgcccagccactgtgaaaccgggtttatcggccagagatattggattttcggccaagccgtttgctcactgcgacaacgtataatttcctggttaatcacatcaagccggttactcaaatagagggtatggttgttctcttctttgggctgtatttccgtaggtaagaatttaaaacgctgacgcaggtctttaggggcaaataacgaaacaacacctttgttgtccacttcgtatttgagcttttgtccctgctggttaagatacttcagcgcgtgctcacagtaatcgatatcgtctttaaacaaggaaacagcttgggccgtatcatcgccttcttgcgcattggacacgtcgtttgcgaagcctgcaaacaggtcttcttcttgctgctcactattttggctgtagaagttgtcaatccagtccgcagggtcaaagctgatgtcatcgctcatcatctgatcagcaatttgcgcttcttcttcttcttgagaatacgcacgagtaaactccgaactatcaccaatgtttttctgcgcctgatcgtctttattgatcagcacttccagtacgcgggtatctccgctaattcggggattgtcgctttgcgttagcaggtagcggatttctggctggtgtttctgtccatagcgatcgatacggccattacgctgctggaaaaccatcaacgaccaaggcacatcaaagtggaccattttgtggctgaggtgatgtaagttgataccttctgatgccacatcagaacagactaataggcgcaatttcgagttttctttgccaaactcctccacgacgctcatgatatccgtgtctgacatgccaccatgtaactgggcaatagctcccacagctaaaccaaaatcttgctgcagattttgatacagaaactctagggttttgatgctttcggtaaagatcactaagcggtcatcggtttggcttttcttccactgaagatctttttgcatcgtcgtaagtaactgttggtacttgctaaaactggctttatcgacgttgcgcaaagcggatgcgagatgttcaagctcattaatgtcttcttgataatcgacatcactagtgttcttaagcttctgttctaatttttttatgcggttttcaacagtagacaaacaagccattgggctggaaaacagtgccttttcaagcgttactttaaatagtttggtgcctttgttacccgactctaagctgcgcagcgacatttcgactaagcgacgataaacctcttcttcttgtgcgctggctttggcatagactcggtcaatgtgccgttctggaaactcacccaccatttggtctttgacgtctttcttaaaacggcgcaccactagatttttatctttaaaatcgtcgtaactgtaatcactagggttggcaatggcggttgcgtccagcatgttcatcaagctagcgaaactttcagccttgccatcgtgtggcgttgcagaaagcatcactaaggtatcgctacgacgagccagtaatttggctaacttactgcgctgcgagtgtgaaccacgttctgctacgttgtgcgcttcatcaatgactatgatgtcccagtatgcactctctaggtaatggcgatactcgacatcttgcttgagcgtatctatcgagataatggctttatcgtagtagtaaaacgggttgtgattagtggggatgcgattgcgtacctgctgaatcccggttgaatcaagacgtgttaatggaatagaaaaacggctccaaaattctttttggaactgcgtcaacattgatttcaccgctaagacaagaatacgcttacctttaccacgacgaataagctctgacactaaaatgccagcttcaagggtcttacccaaacccacggcatcagcaatcaagatacgttgacgaggctgctttaacaccattttgatcgggtcgagctggaaaggtaatgggtccatcgccgctttatgaccaagatgtactttctcatctgttggcacccgttggcgcagcatactttcgatgtataacttggaggcgctatagcccgaggagtcatcctctaccaatagggtatttttggggtctagtatttcaattttgttttccaaactcgtcaagaatcgcccttctcgaccgcgtactaactcggaaatcccttcacaggttatcagcagaccaccatctgaactgctgtcgactttttgaattacccattcagcatcgcgtatcacaatgcgcatgccgggagcataattgacttgttggtttatcattaatgttcctttaaaagaaaaacatcttttccgttttttgtgtgcttggcaacctgtgacctcataggcagtcatctaagaatcaatgatttactcaccgactaacttgtaattcccggagctagcatgatgtttttaactccataaagtgttgctctgttctttaaatacaattgagctccaccatctttgagtgtggcgttggtagaacaatccacattccattgtctgagtaagtagcctgccgatgccgctctaatctcaacctttagaacgccccccgtcatgccataatccagctcaatcgcttcgctgtgctcaatacgtgggtgcggcactaactcaagttcaacaaatctgttccattgccggtcttgggtttcaagttcggcttcagacagcgtggagtcttcaagcacagccgctgctttaattcgggtcagcacaaagtcacggaactcgccatgcttgcggtcaaaaccacgaacatgccaacgcaggccattgtccaccagcgtatgcggaacaatttcacgcgttgtttcaccactcgataacgacacataggtgatactcaaggctttgcctttgtgtatggcctcggtgaccttcgccactatcgataaactcggcttgttaaggtgataaggcgcttcacaagccaatggtggttttaccttgccagtgaagccatctccgtatccttggctaatggttgccagagttctcacaacgtcgtactcgaacaggggctcaaaagcttcaccacgcttatgtaatttgagcttttggtcatactcaatgttgcctggcgcaagctctcgatacattgtgaagtctttcgttgcttgtgcagcggctatgctgaagcgatcgactaaatcagctcgcaccgcttcgcccttaaacaataaagtgaaatcgatgtgggcaatgcgatccctggttgcttgtggcaactgcgctatctgcaaaagcctatctggcttcgccactactgtttgtttcagaccatcatttgtcatgcgtcttgtttatccaattcaaccagattcttaaaactctgtttataaagtacggtcagacatcgcgtaatcacattgaatagtgtcactcaatgctgctcttcatccgcaatgacttaacaatctctaccggttgaagctggacagatggccataaaacactgaataggcttcaacctaattaattttattaggtatcatcctatcacaaattattttgtagggaagactaagcggcaactttttgatctggattgcaattgccgctcaggtatcggtgtgaagaccttgtttcgtgtcattggtgatagccgagttcaatgcgctacccgaaccagtggcaccacgatgttaccgcgatgagatacccctttgtccgtctttgtagacatcagggctcgttgctcactctcccgaatgcgcctggcaacttctgcctgagctggtagcaatggcagcatcccttcagcaatcgcgtccggtgcagattcttggccacaggacatcaagtgcttccatggatctttaagaaagcgctcgaacgtgatgccaaattcaatgatgcgggcagagacgaagatttcgccccagtattcaatgtaggtgtcttggtacatggaaagattcctctttttggttaaaccatgagttcactttccattttccagaggttttcaaatatgcaaggcttaccttgtagagagctacaaagctttaaatcgattgcgggcatctttgtagtcatagtgggcatgttctgagccacgatgatacaaatcatctaggtaagtttgttcctgcggcaactcgtcttcgctgatttcgcgccaccaatgtttgttggcacctttcacaccgtcatgccagcggtaaccacgctcttttaaatagtcctttacgtcaaacggcgcaccaaacgcacgaactaatacagttcgcctgtctgcttcagacaacaagtttgcaacggactcgggcaacaaatagaacaaccaggccatcgccaaacaatcggttgcagctcggtgtccttcatagaaccaacctaagcgaagcagcaggtactcaagctttctactttcaaagcccagtgctttccaatctatgccactggctgaacaggcccaagatagatggcctaatgcagcaaaccgattttcaaagaaaggacgatcaaactgtgcattgtgtgcaaccaccagcggatcatcggataaccaactcgctaccagtgaatcatcaatgtgctggccttgaaccatatcatcggtgataccggttaactcggtaatcagctcggggattggcttgccgggatcttcatacaagctgatcaaatcaataatcgacacaatccgctgagcagaggggctgtaaagcaccttaaccataccaagctcaataatggactcatcatcggcagacagtccggttgtctctgtatcgagcagcaccattggctgttcatcaccgaccataggagaaagttcaagtggccaggactgcggctcacgcgttaatggaatacgctccagcaatctaaaatcttctggtctttctgggatatccgcgaggcgctctagcggaaatggcgcaggggctcttgtcattgatggttcctcttcaattctattgttcgctttaggttatttcactgtgccctgtccgtttataaacgcatttgtacaaaatgcacattggatacctcagcgtttttttaatctttctactgggtgaccccatgtatgaaggctttgactaagcctttcggaaagccttagctaaaccgtttaggtaacccttaccgataccctttacgtatggcttagccaaccccttttcaaacggttgcaaaaggcttgaactaagttcgactgaacattttaaagatgctcatgacttcgctttaagccagtaaattcaatacgaagcagaattttactaactgtttttaaaccctttgcaaagggttcaacaagccttgtttgacggttacttgacccatgcgttaaccagtagcagtaacaggatcagtaacagaaacaagagcagtaggcagaagcagtattgtccaagccttgcaggctttgacgagggcgagcgatcccccacatctagtttttcatcacaaaaaagaaatcacccacgacacaacgtcttactcgaacaactacagttttacctacaattttacttgtagaaatcagcatagcattagatactgtataaataaacagtatcaattgtgattttttcgaggttcgtcatgagtgtctcgctgatatgccgtagcggcgcacttgccttcatcaaagccaagcgccttcgtattccattgtttatggaacgtgtttctgctggttttccctcaccagcgcaggattatgttgagcaaacgctcgacctcaacgagctgtgcatcaagcgaccggctgcaaccttctttgtgcgtgttgaaggtgattcaatgattgatgctgggattcacccagatgatattttggtggttgatcgatctgtccaagccgaacacggtgacattgtcatcgcgggtatccatggtgaactcacggtaaaggagcttcaactaaggccgtgcgtcatgctgatcccaagaaaccaggcgtatgagcccattcatgtttctgaagggacagagttagagatatttggtgtggtcaccaatgtggtgcgaaacatgcgccgcaagtcgtgactatcccatgccagtatttgccttggtggactgcaacaacttttacgctagttgtgagaagctgtttcgtcctgatttaaaagatacgccggttgtggtgctgtccaacaatgacggctgcgtggttgcacggtcgcgtgaagctaagttactcggtattaatatgggcgtacccgtctttcaaatcaaagctgaaatgcagcgccatggtattttggcattctcgtctaactatgcgctgtatgcagatttaagcagtcgagtgatgcgcactttggaagagatggcaccacgagtagaggtttactccattgacgaagcgtttttggatttaaccggtattgagtctgtcctatcccttgtcgagttcggacaacaagtgcgagagcgcataggccactggattgggatcaccgtttgtgtaggcattgcaccgactaaaacactcgccaagctggctaaccatgccgccaagaaatatcccgccactcaaggggttgtagatctaactaatccagatcggcaacgtcgattgctcgcattagtcccggttgatgatgtttggggcgttggtagacggctttcaacgcgattaaatgctctgggtatcaccacagccctagacctcgccaatgcctctcctagagccatcagagaccagttttcagtggttttagagagaaccgtcagagagctcaatggtgagtcgtgcattgaacttgaagagatcccaccaactaagaaacaaatcgtctgtagccgttcatttggcgtaaaagtaacgcaatttgaattgttacgtgaagctatatgcgaatacgcaacccgcgccactgagaagctacgcaaagaacagcagcaagccaaagtgatgaccgtgttcatacgtaccagcccctttaaggacaacgagccgcagtacagcaactctgcatcgggtgaattgctaatcccaagttgcgacacgcgggattttatcgagctggccagtcacttactcaagcggatatggaaggatggttttcgttatgccaaagcgggcatcatgctgtctgacttttacgatcctggcatgtttcaaccaggactattcgatgacgtatcgacccgctctaatagccaacagttgatgtctgtattggacaccattaatcaaagcggtgccggaaaggttttctttgctggacaaggtacgaagaaagattggtcgatgaagcgagagcatttgtctcccgcttatacaacacgctgggaccaattaccgcgagtgaagtagcgccgataattcagtaggcattcactctgcgacgcagcatgttgagcttatcaacttggcgtcgaacatcactgaagaactcctctttctccatggccagcgctagctcccattctttggccaaaccttggcagtccaaaaatgagtatctcagcttcgtctttgagatacgcagccccttgctaaagaccacgcgtttgcctcgttgaccgtgaaaactgttgatgtaccactctatgccaaagccatacttaaagtctctgatacggacaccaagcagaccccagtctttaaagggctcattctcacgaaccttgtaatgggtaacccaaaagtcatcaacttcagctcgtgccagcgcttttagcctgtccgtttcttgctgaagtaaatctgatacctctactttccattgttcattgacgatttctaccaaaccaatttccccatccaattaaccccaaaagccaaaaccactatccgtttggcttttggatcgaaacgccaaacgtaaaactgccgtaacaatcactgtttggcgtctcgatataaatcaactcgcgcaatcccatacctgacaagggatacaatccgatttcacttaaaaaagcctgaaaagacgtatcgccatgaagatacaaaccgtttggcgagttcaggccagaatgcaaacgacgtttggcgtctcgatttttttggctcagtcatccgccgcaaaacagagcctattctcatacttttgcgaaaatgcaatcggcagatagatgaaaggatttgtcacctttctgcccaccgccagtgcaccgaatcctgataatgacatttgagtgaaccgccagagcacttggaaatgcccaagcgtgaacagcgcggttgattgaaaaccgttagagcactttgagtgcacaggagataagtatgtttgtactaggcgtagatatcggttactcaaacctgaagctggcaattggccaatcaggcaatgaaccgaaaaccattattctgcctgcgggtgccggtcctgcggatcgtatgccggagcgtatcggtggaggcgatgatgaaacttgtttgtatgtgtctgtcgataatgagcgttgggccgctggtgtgcctgctggacgccttcaaggctgggaacgagagcttcacccggaatatcccaccacaaaaacctataaggcgctttttcatgccgccttgttaatggctgaaacagaatccatcgatttggttgtcactggattaccggtttcccagtttcatgaaccacaacgtaagtctgaccttgtgcagcgtttaaaaggtgtccatcaagtgacgccaaagcgcagcatcaccgttcatgacgtcaaagtgctgccgcagcctgccggtgcctatatggatctggttcaaacaggtggtgatttgggcttgattgaagaaggtcgcgtcgtcgtcatagatcccggcttcttttctgttgactgggttgcccttgaggccggagaaattcgctacagctcatcaggaaccagtcttcaggcaatgtccgtgctactggaaactattgataagctgatttcggaagatcacggtgccaaagtaggtatggatcgacttgaaaaagccatgagaaccggcgacttgcaggtcctgctatttggagaaaaagtcgatatttcaccttatctgaatgctgccatgaaaaaggtagcgccagttgctcttacagccatgcgccaatctatgcgcgacgaaagcattaatgcggacttggtattgatcgccggaggtggagccttggcttataaggaagcggccaaggagattttttcacgaagcaagattatcgtgccggaacagtctgttttggcgaatgtccgaggcttctggttttatggggcatgatcatgagagttgtcgtcaacattcccccagggagccaccctgaactgctcaaagaattggaaaagacgccaccacgggaacgcgctgagcgtctgcggatgctggccacctttgggttaattcacatgagccaacccaatctatccacggcatctgtaccggtggatggccatgcaccagatggtgaagtgacttctatgagtacagcgccagaacccaaagcagaatcacgtaaacaatcattaaaatcaaaactagggatgggcttataacatggcgttatcagttagctggctcgatgccaggttaaataaagaagcaaaagaaaccgtagtaaaagccgaccgagatgggctaagtgctcgggtatcgcccaagggcaaaattgtttttcagtttcgttatcgattcgatggcaagcaacagcgggtagacataggtacttacccactaatgaagcttgctgaagccaggaatgagctggataggttaagggcggtactcgaccagggcagaaaccccaagctctacctacagcaggaacgggctaagtattctgccaaccaaagcttcgaatcgatttttcgagactggatagactctgccggtaagcaagggctaaaggagaaaacgtggcacttccaaaaacgcagcagtgaaatatatttgctgccccgacttggcaagtacccattaactgacatcaatgaactgtccttaagaaactgtcttcgtgaggtttcggagtcgtccccttcaaacacagaacgcctagtgtctgtactgcataagttctatgactggctgattgatgaacaaattttggaaattaacgctgctgctgggatcacagcaaagaaggttggcggtaaaaaaggaaaacgaactcgggtgctaaatgacaacgagatcaggatactttggcgctatttgcatgagtcaaaaatcactgagaagaaccgcatctacataaaattgcttctgttattgggaggccgtaagggagaactcattcaagctgaaaagcatcactttgacttgcaatctgcaatgtggacagtgcccatagagatccgcaaacaaggtgagaaaattggagcgccgatcatgcggccattgattaagccagctattgagctgattgaactggcgatgcagatgagcaaatcaacctacttgtttcccgcgaacggacaagaagagcttgccacaaatggctttgataccactattcctaataatgtgaaaatctgggctcgcagatcgcttggtattgagatggaacactggtctatgcatgatcttcgcagaacgatgcgaacgcgaatgtctgccatcacgacgcaagaagttgccgagttgatgattggccacagcaaaaaagggttagatgctatctacaaccaatatcagtacctggatgaaatgcgtcatgcttacgacgtttggtatcaacagctagaaaccatcatcgaaccgacaggctttccattcaactggcgtttcggacagtaaaataaaagaaagaggctcagtcctctttcttctcatactcctccaagtcttcaatgtgccacagcttgtttcgtgtatttcggttgatacgaggttgcggcaagctgccatcttttattcttcgccagagcgtcgtatagctaatgtggtaacgagccatcacttcgtaagatgttagaaaaggggttatctggtgcgctactgctgtcatctgcattctcctgaaaatcaatgtaaagctatcatcgcctgattcatcacttgttgatggtcagaaagatgcatgatttgttcagaagatcagccttatcaaaacacaaatgttgctattaggtacttttcagctcaaacctatgaataacaagggctacaaggcggtttgtgtcatgaatagcaatcaacatgcctaacgtgaaaaatttgtacacactgtttgtacactcgcaacgatgacacatcaaaaaccacaatgacgaaccgtttaaattcataagcttacaaacataaaactagagatgatcgcatttattccgcttttgtaatgtcgaaaccaaagtaccaaaagcagaaggtactttcttcatcaaacccagtaaccacaaggcctacagccagatttgtgtcatggaattttcgccaaaggcctctaaaacggaatttgtactcaagtttgtacacactttccgaggttacgcttgaacatcattgaaaagcaaagaaacgagaaaaagacaaaaagcctttaaattcagtacgtagagatgtgattgtggtgtgcaatgaaaggtggttttaagcgttgaaaggctgggcggcatcagggtgggaaataatggcaaaagttctacgacgagcaacttcttgctgaaaaataggattagacatcaatagtgatcttctagttgataaacaagtgaatgcactgcactgagatatttctataacgacttattaaagtgactataaagcacattcacccgtaagttaatcttagttggcgcttattttcgcctatcttggctttataaacaatcaatggttatctatttattctcagcattgtaccaatgctctgttgtcgttgtttgtaatcgttgtttttttagctgatgaacatccttttaatcctccccataaataaagtaaacaaatttgatcctttttagtgtcatttttgtttacttgattcacaccaaaattaagtatacagttatgacatgtttaagtgttatttttgataactaaaggtgtattgtgaaaaagattgaggcaattaaaaagctcttagaatatgacaagcgcggtcgctgcgtttttactaattcagatctggccaacatctttcatcaagataatgaacgagcattgcgtgcaggaattaaacgtttgcaagacgatggcttactcactaggatcattaatggtgtgtacttatacaatttagcgcagtcaaaaggcagcgatacgttggagcaaattgctaaaactattcgacgtggggaatataactacattagcttggagtctgccctttctgattttggtgttatttcgcaaattccagtagatcgcttaactgttatgacaacgggacgttccggtgaattcaaaacgcctttgggtacaattgaatttacacatacaaaacgagctccaatcgacattatagagaataccactttagtcggcagaccacttagattagcaacaaaacaaactgcatacagagacttaaaacgagtcggccgaaatacacatttagtaagcaaggaggaactatatgaaaattgatcaagaaaatttcgcgctattggtgaataaagcaatgcaggtcggaaatgtatctcacatgcgttccgtgatagagaaagaactcttacactacgatattttatttgcgctagaaaaaggtggacttctaaacaaactgacttttcaaggtggcacttcattacgtctttgttatggtggtaatcgtttcagcgaagatctggattttgctggcgggaaggattttagctcagcaatgttggcagatatgaaacattgtatagaaaaatacattggcgaacgatacgggctagaagtaacagtaaaagaaccaaaagatctaaagcaagatcctaaatattctgaattgagcattgataagtggcaaatagcagtagtgacttctcctgagagaaaagatctaccaaaacaaaaaatcaaagtagaagtggcaaacattccagcctatacaagagagccccaacctctgcaaataaactatgattttttgcctgatggatacagtgatatgctaattttgacagaaagtttggatgaaatcatggcggataaaatcatttctttgccagccactacaaggtatgtccgccaccgagatatatgggatttagcttggttacagcaacaaggcgcgacactcaatatggacttagttaaaaataaggtatcagattataaacttgagcacttcaacaaaatgttggaaaactttctcgaacgacttcctagtattgtatctagtgaagcattcattgcagaaatgaaacgtttcttaccaacagatgtatttgatagaaccctcgctcaggataagtttcaagtttacctgcaaaatactttggcgaaactatttaaaactgtgagtaacgaattactaggcaaggtcactaatagtgaatttagaatgtaaattaataaatggctcaacttgatgggattcacttcagtattttcctatcttaataggctttttataaactaacgataaatttaagaactaaagtaaacatgcgttttacttattttaacgcccttcatattgtctttattattctcacaatatgttttactaaataccccttgtaactaaagtaaaattatttaccaaaatatccattaggtaaaatttaaataaaagaataaaagtctactcacttcacataaaataaaaaaagacgcctaatagaagacgtctttaatttaacttaaataagtatttaattagaatttaattggataagccatgattatcgcatcttcttttcccgttgctgttggataataattcttacgtacagatactgaattaaatcctatagattcatagagattagatgctttttgattggattctcttacctcaagccataatgtagcaatatcttttctttcaatattatcaataagttctaataacaatgcttttccatagcctttaccttgataatcaggatgtatcgcgatattaaaaagcgttgcttcatctaatattaattgcgtaatagcaaaacctaccataatattatcaatgcaaatttttagattaaaataatgatcaccttggttactatagaatgtttcttcgctccaagggaatgaatgacttagtttttcaatttcccatgctaaaggtaaatcagcagggtttaatggggaaatggtcttcatgttgatagatttgtttccaaagatcgcgttttgcattggcatcaaaatataattgatgtaatgaagggcttctcagagaagtatattgagcaggtagagtgatatcagtacctaatagccaacaggctggtgtaaatgatcctgtgagcaggctcacatcctctgaggtaatacaatagatttcacttttatctattcccatagtgctaaaaatatcagagaaaagcccgttatttagatcaacaacatcatcagtaatgataagtaaacgagtggtatccggaaattgcacagaatgttcgccttttaatacagcaggcttacgaagtacccattgacgaattccaagttgggctaacattctgtctttacggctcatgatatttacctatcaagtgtagaacaacggtacatagtatcagagggcataaactacgccaataaatagcgtcagtttctttatatctgatatcatgcgttttatgttttttaaggagtaataatcataatgtcctcattgtcccctgccagcgaagttattcttcgtcatctagatcatttcgcagacaggcacgtactcatagcaggtgatcttcaagacacgctagcatcacaaattcaggccaaaagtgttagagcctatacaaatcaatatcaccagtggctaccgctactcaaatccatgggtgataatgcattttttggtttagcggcagatcaatcattcgtaaaatattgcgacactttgatttatttttggcctaagaataagaatgaagcaacttttcagttacgtagcttatgcgcaagtttatctgtcgggactgaaatcttcatcgtcggcgaaaaccgtagtggtgtaaaaagtgctacggaattaatgaatggtatagcaaagctaaaaaaaatagattcagcacgtcgttgtagcctcttttttggttcactaacctatcaaacactctttgatcgaaataactggtggcaaacttatcgttatgacgatttaacggtgatggcattacccggtgtttttagtcaaaccgcattagatgaaggcagccgattattactctctacatttgatgatgcaatggtaggtgacttactggatatggcctgtggttgtggggtgattgccacggtattaggcaagaaaaacccgatgttaaaactcacactctgtgacgtcaatgcagccgctatttcatccagtattgccacgttaaatgttaatgaattagaaggacgggttattgcaagcaatgtctattctgcggtagaagaaacttatgattggatagtctctaatcctcctttccatgatggcttaggtaccagctatcaagctgcagaagacattattcgtctcgcgcctaactttttgaaaaaaggcggtaaactgcgtattgttgccaatgctttcttaccttatcaagatattcttgatcacgtgtttggctctcatgaagtgcttgcatcaacaggtaaattcaaagtttaccaagcaaccaagaaatagtaatcaccagcactattataaaaaccgccagtaattgatttttcaactactggtggccttcggtatttacttcctttttattatcagcaggttatcatgcctttatttacggttatctacccatgataggttaaaaaaaaggtcattaagctataggtgatcacaacgccggcggggatcatcacccacatttgtaatttcttatgaaataacataatggtagatagcaacatagaaataacaagaaccaatgtaaatgctgctgttcctgcaatagagtgggtgatcacagtaaataacgaagcaacagccaacatttcccataaactaatacgagatgtccaagaagagacagaggagatacgtgttgatttagccatgagagccaccatctgttaatgataatgattttcattattatataacacattggttaactcaatgtctatcaagaaaaaaaagtagccatacccttaattttaaagaggttaaacaaaaaacgctttaccgctgccaacgataaagcattttagagtcatcaaatgatgatgtaaaataagtgattaatcttctttattaaaattaagcactaaatgaatatcttcaggctctctttcataaagctcagtatcaggcacatcaattaaacgacagcccatatgctgataaaaattaacactattttcagaaggcgttgaggatatatataatccgctagcccctttttgcttcgcatattccacacaataatcaaacaatatacgggctaatccttgcccacgctgctggtggctaatatgtaagaaagagagctgtaacaaggtgttatcttggcctcgccactgtggatcaacactggtagcagcgactaacttgtcatcttcaaagactccccaaaaaggggcaccgcgctcagcgctttcaagtaaaacaggggtataatgttctgcctcaccttcaggccagcctttcatatcaaaacgctgttcagataacaccagttgcccttgttgtaaaacatatagcctttcaatcaattctgttctatcaatttcccaaacgcgagggatttcattatgtgttaatagacgaatattttttttcattgttgaagattaacctgttctgaagaagatccgctccgctctaatgcgtggtaagccactgcacagaataaggagttcaaccgtttcatatcacccaacaaactggtatgcagcgaactggtttcaatactttgcatattatgcaaatgaagacgttctacatgagcaaacgagtaacgttggttgagtaaacggaatcgatgttttgctcggcgtaatttacgcgcatgctccatattgccggaaacaaacaccgacatcgccagattcagattactttgcagacgctcaaggagtgtctgtaattcacgacgtccttcctccgataaatttaagtgatgatctaaacttttattcaccacctcaccagacatacgcgctatgatagcggaagattgttgcaaattcatcgcggtatcaataatttctgcccagcgacgagagtcttcagtaccaagatcatgctgctgaatttgtgccatatacaatttaatactgctatggagcaattccacttcctcttctagctggctaatctcccttttttgcagacgatccccttccattaaggcttgaaaacgttgcaacatctgttcaaccacatcccctaaccgtaatgtctctctgactgcattagcaatagctaaagagggagtatcaacggcggatggatctaaataacgaggtgcaacttctgtcccagtaacgggtaattccggcactaatttttgacataatttcgccattggccccacaaacggcaacatcaacacacagcgcactaagttataaatcacatgaaaatagataatcacttccgcaggggaaaaatcatattgttggatttttgtcgcaatgatggtgatccacggcaataccagcaaggcgccaattaatttaaaaaacagacttcctatgacgacttgacgtgaactaatactttgaccacgactactgattaatgccaacaatccactaccaatattagaaccaataacaatacataaactaatatataaaggcataaagcctgttgcacttaatgttgcggtaagtaataccgccgctaagcttgaataactaaccatcgcaaaaatagcgccgaccaatagtgctaaaatcgtatccccgctcaaagaggtaaaaatagcttgtactgcactggcatgggttatcggctcagcagaagtcacaatcagttgtaatgctaagataattaaaccaaggcctattcccactctacccagttgcccgatacgctcttttttacgacttaaaaaagtcatgacacccaataaaatcagtaacggtgataaccacgaaagatcgaatgtcagcacccgcgccattagcgctgtacccacatcagcccctagcataatcaccaaagcgggtgtaatagaaataaggccttgagtgacgaacgaaatcactagcaatgccgtagcattactactttgtactaaggcagtaacaccgacaccggcaagaaaagcattcgattttttattaatacttttacctaaaattcggcgtaaatcagagccgaacacacgcataataccggtgcgaacaatatgtgttccccagactaaaagtgccacggatgagagtaaatgaagcagtgttagcatagaaattagtcaccttattttttatcgttgtttattggctcatttctccttcaatgccataaaaaagagagagatcctacgcagataaccatatctgaaaaatgatttttatagataacgccctaatcaaaacgacgttattaggcaaaaagatattgcgacttaagtgcaataatcaatggagaagttaagaatagtataagaatatcattgtaaattctgttaattatagcaaacaaaaagtaactttcaaaattagactgtaaataacgtcttgatttattatcgttttcttattttttgtaaagaaatcatagaaaaaaacgcgacttgagggtatctctctaagtcgcgtgaaaatacaacaattttagtaagacaattcaactacatttcagacagactacaattcagtcaccttatcaaggttatttcaatcccatcgcatcgcgcatagtaaagaaaagatctgtttggtctgttaaccctacgacattagcagcatgtggaccataagcggcaacgcgtaattgcgcgcctgtatgctcttgtgaatccgtttctgagttaccataattcaccaccatgacagcgccatctttggtaatcaatgcttgtgttaagccgcttgatttcacatcagcttcaataatttgactagagtgagcgtgatctgcggtcactataataagcgtatcaccattttgtttagcgaaatctaaaccaatttgtaccgcttcatctaatgccaccgtttcaccaatttgaccacaaggattagcattatgatcttgtttatcaatggaggcgctttcgacttgtaagaagaaaccattttcattcgttttcagcaaatcaatcgcttttttggtcatttgcgctaatgttggtgcattcgggtctaattttgaattcggtttacactctaaaggaggattctttaaattaccttgataagtggcttttggcccttcccaagcgacggccatattaccgtcatgaaatagacctaacacaggtttatcttgatttgctagcgtaatcgcctctaacgatttagcatctttcacaatttgatagccacgctctattgcttgttgctcgagcgttttccctttatattcaccggccgttgctgtttgagcaaaacttttcgcgcctcctcccagtgtaatatctgcacgagtcactaacaattgctcagagattgaacctctaccgccattttctagcgcattcgttgagcattttgctaacgtttctacaggcccataacacttacgcccggtaacatgtgaaaatagcgcagccggtgttgcatcttgaatttcagaggtagtgacattccccgtcgctttaccattcgcttttgctaattccaaaatcgtttggtgatctttaccaaacacatcaatccctaatgccccattataggttttaacccctgaagcccatgctgttgctgatgcggccgaatctgttacataattaggtttttgtgtttttctatctaaagaataatgagtatattggccggtcatcggtaacgcatcaatccctttaaagaagccaccagccccttcggcatagttacgtgctaccgttatctcagaatcccccatcccatcaccgataaataggatcacatttttagcttgatgattattaagtgctgcttttaatgcttcagtttgatctgaggttatacgacgagcaccaccaaattccgtaatattaccttttgctgcgcgatcttgcgccaaaatagtatcggcagtgacgggggctgcaaaagaagagaaactcacgcttgtaaagagtgttgcgacgactacagataacgcagaacgttgataacgtagagacatagctttttccttgcacgcaaaaaaataaagaattttggggtttatgttttaagtcacaaagagcttacgagagtaaaatgacaaacagatgaaagaaaaaagcgatttagatgacagctttatggcaattgacatcctccacgccctaaaggatgtggatccctactgcgttcagactgatgtctgaatcacctcggcgggttcctgcttcgacgggcggtctgactgccccctccctccactggcaagcacggcatgtcctgccgctaaaatgttacgtgccccgttgatatcagcattcgctgtatatccacattcaaggcactcgaattgactttgtgacgggcggttttcctttgctgtatgaccacagcaagcgcacttctgactggtgtaggctggtggtattgccagtacctgacctcctcgccagagctgcttgtactcaagctgacggcgcatttcataccagccctgctccagtattgagcggtttaaaccagatttagcttttacgttccgtccaggccgttctgtcgtaccttttgccgatttagacatgttactgacctttaagtcctcaatgacaatcattgcgtggtttttgctgatttcgctggtgactttgtgaaggtagtctttccttatattggcaatatgagaatgcagacgttgaattttgcgcttttgtttttgccagttggcactgaatttgattttacggcttaatttccgttgaagccttgccagctttcgctggtttactttaaaactgctgacgggcgggtataccgtaccgtctgaaagcgtggcaagttttgtaacgcctgcatcaagcccgactattgaggttgattcaggttgtggttctgtcgcttcatactcagtctgaatgctgacgtaccatttaccgcatgactgactgaccgtgacgtttctcacttctccgacgacttcacgactgttgcggtagcgcatccatcccaactttggcaatgatatacgactattggattgatcgagcttcacgccctgcgggtagcgaaaagcctcatttttaccgcgtttcttgaatcgaggaaaagcggtacgctgctggaaaaaattcttgtaagcccgttccaaatctttaagtgactgttgtaacggttgtgatggggcttccttcaaccattgtgtctctgtgtcagatttccactcaatgagccatgaagccatttttgtatagggaatgtatttattccctgcttcgtgctcctcattctgacgtgctaatgcccgattgaaaacaaaacgacaagcccctgcaaagcgtctcatctcacgctcttgctgaccattgggtcttaactggaatttaaaggcttgtagacgtttcatattacctattatactttggtccatgaaaaatgaaactaatattcgccgtggcagacattgtgtattcctgatgcacgtccatttggtctttgtcacaaaataccggcgaaaaatatttgatcaggatgcaattgaaaaatggcgaggctactttgccagtgtttgtgctgattttgatgttgaactggttgaaatggatggggaacgggatcacgttcatttactgattaattacccgccaaaactggcgatatctaatctggttaacagccttaaaggggtatcgagtcgattacttcgacgtgatcgtcctgatattgcccaacgtgattactacaaaggggttctttggtcgccgagttatttcgcggggagttgtggtggcgcaccaatatccattatccgccagtacattgagcaacaggaaacaccgagttagttaaaaaaccgcgccttatatccccgacctgaaggacggggttttacggtgctttggataaatgacaaattagcctaaagaaaaaggatgtgtagttcaccaccactcacatccctttaagataaaaaagatgaataattaatcgttagttaacgctttagtgccgatataaagcgcctcacaccaagagatataatcatgcccgctcgccatctcgagcgattgcacaggatagcccctttgctgtaaaacctgctttaattggcgattattatttaatattcctccagcgccttcgcgagactcaaataacccagcctctaagaaaaactgtaatggttttttatccgcctgttgatattggcgaattaaccactctggggcttcgttttctggcgcccaccaataagagccggacatactaagcactttcccaaagcgatcaggacggttaaatgccacccatgcagaggccaatcccccatagcttgagcctgagactatagtttccttagcggctacttgcaggcctttctcttgctctaaccaaaccaaaagttcatccgctaaaaagcggtgaaaatcaggattaggtggtaattcaacactacgacgatcactatcaatactatcgacaaataagatagcaataggaggtaatttcccctcttcaatcaacttatcaaaaaaccggtctatgccatattgttggcgataaatttgtccatcaaatagcaccaatagtcgcggtgtcgtcattttctgtgcgggtaaataaagcgcaatctctcgatcattgtttaaaatttcactatgaaaacgactgattgatgtattgccattcattgccctatctaagatatctggcaactggcattcacggggataatcaagtgacagcaatgaaaagtaattataacgatcgtccgctttacttggtgaagggtgaagattaaaaggatcggcctgtgccgtcgttaaaatagcacggcgctgctgtgcagctgttgcattttcaatgactggcacatctggtgctaatttatattgcattaatgtatcgttaggcacgatataactacgataccaaatatcgctattggctaaacgcgttaacggatcatgatcacctgcaggcgatcccaatagatatacattagattgcgcaccttgccataaaaaagtcacgcgcttgttatgattatcgtaaggttcaacaaggggagttccctcttgctgtatctgttgccagaataactgtatattgctggcggtgagatcttgtgccagcatttgcaatctagggctagttaatgctatacccgcatctttatctaaaggctgataagggtatgttttcagtgtgatatgccactgtaccccaacttctccttgggcaataaactgataatttgccgtttcaggtaataggaagcgtatcttttgttgttgtccatcaacgggcacatcttttaataagcgacgaacatgagtgccatcttggtttgctaattgtagattttgtatacctttaacatctaactcagcataacgctggctctgtaaatgtgtagaaaaacagagtgccttatcgtgattaaactggcctgttatttctttattttctgttattgataagcaattggcgaaactagaaaaagaggccatcaatgcgcagatcattagaggagttctcactgtattttctcattataatttaggtaagaacttatagtaatgataattgttatcaattcaataaggatttattggtgtatgaatttgatcacttagaataataaaaaactccacaatcttttggttttcttgtggagttttagtagcaaaataatattcaaagggtctatcaacgctcttctaatggataactacgaaagctccataatcctaatgcttttaagccatcgcgataaataccttgtaaatcagattttgatgttttttgtaattcagctaatggcttatcgggggctacaaccgttaaataggtgatatcactggggccactttgccaactcgcaaccgtaaaaatagcatcagcacgacgaacatgactaccagagctaataatcaccgctgttttaattcggtgtttagttaatgcataacggctaaataacgcattctccaccgttgagcgtgcataattgtcttggaaaattcgctctgcgggaataccttttttaactaaccaatccgccattaatttaccttcagtttgatgtgctttcggcacaccacctgtcacaacaatcattgcatcaggtaactgttttgcgacttcaagggttttatttaaacgatcaatcaagatctgattcatcgtaccatctggattaagtgcataacccaatgtcacaatggcattatttcctttggttttatttagcgttgccaaatctgctggcgttaacttatcacttaatggcattttgcttacacgatcaatttgagcaaaaaagcggcttagctcttcagcttttgccggattaagggattttaacttgttaaaataggcttcactttctttatctttaccttcaaaacgcgtccaagaagtcacataaattaatgcatcaatatcatccggtgcggcttctaaaatttgtttataaatcgttaccgcacgctcaatttgattgttatagacataagcactggcggcactaaatagtaaatctaagcgataaggctctaacttataagcttgttgtagcttttgtgctacgacttccatattagaaggtagttttcccgtaaatccagcgtcagaaacacgcgctggcgatttaaatgcctctaatgcatcttggatcaacatatctaccgtttggcgctgagaaatatattgctgatagctattatcgggttgatggactttttgataagccaatgcagaagaggaagccgtaaagcctaaagcagcaatggctaatgaaataactgtttttttgatctgaagtgaaatacgggaaggttgcgccattatcttgtccttttgcgaaaataaatctgtttcttcaattggttaagcttatgaagacaaagtgtgtgactcctcacacttaagagaaaaagaaatacacaccgatatatctatacctaacttttatcatagagatctaccattaatttgcagtaatcattttcactaatttgaaaaaaatagcattattatgctaatcgcttaatgaacagccgtttttatccatactttaggtttaaacaaaaatttcattcttattgtgactatatagctagctataaataaaaaacgccaattaatggcgtttttaaaaatacttattcgatatgctttgattgcatcatcagcaattccctgactaattcgacacaacgaagaaagcgctcatcataatcaggaggatctactttgacatattcaatattgtttttatctaacatctctatcaacaatgtttgaaaacgacggcgctctttatcactccctaaactacgtaaaccatcggcaacccatggcgtattgttctctagcagaataactaaatcaaaacgatattcatcaatcaatgcctgtacaaaaggatgttcttttccttcataacgtaaacaaaaagcctgtgttgttacaaaatcagtatcgataaatgcaactttattagcatatttaactgcaaaatcaatatattgggcatgacctaaagcgattttatcataatcagaatactgcaatgccatttcgtctcctcctaaatgagagaagacataatcacggccatattcccacgcactggttgtattaaaaatattagcaagcttatttactaaggtcgatttgccactcgattcaccacctaatatagccactgtacgcacgaaaaaaggttttacttcggtaggaatatattcccaatatttaaatggcgcttgacggatttgactaccgctaatattcataaacgagcgctcaggatcgaccagtaccgtttcaatacctaaaaatgcttcatattgactggcgtcctctcgttcactggtatagataaaatccggcgcgatctgtttttcttgtagaaaggctttgataccctcactccacatttcccaaccatgaggttgaggctctataccatgttcattaaactcatgaatacgaatatttttctgatacttaaaagtttgtaataaccagcgcaacctatcacttaccgtcggctgttgtgacatcgcactattgataaatagctctttatcacgaggttcgtcatgacataaaatgacatgcaattcatccacttgactacaagctcgttgaattaaataaatatgcccagtatgaagaggatagaatttaccaaaaatcaccccaatggttttctgttgtaatggatattctaatcccaaaaattggtgtaatgcggacattttttgtgcactggggcttttgattttgttattaataagctggctaagatagccctttgtcatctgactttcatcggcaacttgctgtaaggtatagccattcttttttattgcctgtttgatataatcaaaagatcccatgatttactcctttagaagtcgtccaaatcatcaagtacagataacgcatctgatagtttcttcactccatacactttcatatcaggtggatttttctttggcatattcgcattaggcacaatagcacgtttaaaaccgtgttttgctgcttctgcaattcgctcttgtccacttggtacaggacgaatttctcccgcgagtcctacctcaccaaaaataactaaatcacgcggtaaaggacgattacgaaaactcgatactaatgatagtaataaagctaaatctgcactagtttcggttactttgacaccgccaacgacattaacaaagacatcttgatcagacatctgtaaaccaccatgacgatgcaaaaccgctaataatattgctaagcgattttgctctaatcccaccgcaacacggcgaggatttgataacatagagtggtcgaccaatgcttggatctccaccagtaatggccgcgttccttcccaaaccaccataacagaactgcctgaagtcacctcatcaccacgacttaaaaagatagccgatggattactcacttcgcgtaaaccttgttccgtcatggcaaaaacacctaactcattcaccgcaccaaagcggtttttatgactacgcaatgttctaaaacgtgagtccgtttcaccatcaagcatcactgagcagtcaatacagtgttctaatactttaggtcccgctaatgtgccatctttggtgacatgacccaccataataatggcaatatcattcgttttagcaaaacgagtcagataagcagctgtctctcgtacctgtgccacactgcccggggaagattgaatatcggccatatgcattacttggatcgagtcaatgaccattaatttaggttgctcttgagcagcaattaaacaaatttgttcaatactggtttctgacaacatattcaattcggttgtcggtaagcctaagcggtgcgcccgcatggcaacctgctgtaatgactcttctcccgtgacatacaaggttttcatttcagcggctaaacgacacatggtctgcagtaatagtgtacttttacctgcccccggatttccgccaattaaaatggcacttcccggcacaacccctccgcctaacacacgatcaaattctttaaatccagtagaaaagcgaggtaatgcttcaaggctaatttcagagagcttttgaacacggcttattcctttcgcatctccggcaaaaccgctaaaacgatcgttacgggcagaaggtgtcgccgcaaggcgcacttccgtaatggtattccacgcatgacacgcagaacattgtccttgccaacgcgggtaatcggcaccacattcattacatacaaaggctcttttggctgcttttgccacactgctctccccgttattttcttgactgaaaacttatcgttcttcgtgctttaatcctgcacttaaaatacacatcacacccattaaatcagcatgacgaatagctactttggcttgtgcatatactttaggtttggcatggtaggcaatacctaaacccgcctttctaagcattttaagatcgtttgcgccatcacctatcgcaatggtttgttccagcggtatatctaaatctttagctaagcgtgtaagcacttgcgctttatatttagcatcaacaatagggcctttgactttgcccgttaatttaccatctttaatttctagctgattagcaaccgctgcaactaaacgtaatcgctgttttaggttatcagcaaaataagtaaatccccctgatgcaatcgcaatttgccaatccattgcctgaagcttacgcactaaacttgttaacccgggcatcagaggtaaattatccattactttttgtaaaatattcgcatcagctcccgctaattgtgcaacacgcaattttaggctttcactaaaatccatttcaccttgcatcgcttgctccgttatctcggccactttatcaccgacaccggccagtttagcgatttcatcaatacactcaatttgaatagccgtggaatccatatccatcactaaaagtcccggagagcgtaaacgtgggatctgcccaaagggtacaacatctaaaccacattcatcagataaccgacgaatacgacgggttaaacttcccgcaatacgtaccacttggtaatcatcaatacgccatgaagaaaccaccacaatagccacacctaatttatgctggaactcacttattctttttttatcaagttctcgtccataaagtaaccatccgctatcgcctgcacgataatccagtggcatcacttcttcaccactgagtgatagcggtagacctggccatttacggatctcatccggtaaatagcaataggtcagactatttgacatacttattctcctgttttcccctgtctgaacaaaataattgttattcagcctattctatctgtgattcatctggcaacatgcacatacttgcttacgcaaaaggttgaacatgcttaaagataaactaaaattcaaactacaaaaaacagcgattatactgatttgtatcgcattattggcttttttgatgcaaggcgcctcttattttagccgtgcaaatcagcacgcccgtatcacccagtttgaagagcttgccaaaacactggcagaacaagttgccttctcattatccaattatatggatgacagtagcaaagataacgtaaatccacacattatagctaatttaaatcatctaactcacgatagtcgggtactggatgcaagtctttattggcaagatggcacacaaatagcgcatagtggtgaaaatgtgacggtaaaagagcgattggccttagaaggacaaaaaagtggcggttcttttaatcatcagctggtggtgcctatccctggtcaagatcagccaaagggttttctaagattgacgttagatacacaccaacttgtcacagaatctggccaagtcgataacaccactaatttattgcgtgtgatgctattggttgctctggcgattggttttttactgtcccacagcttattgcaattaacaccagtgcattggcagcaatcgccctatttattaaccgcaagtttacccactcgtcatgaaaaagaagatgatgaacaaaaaagtgatcagcaagaagaaacagaaaatagatctgaagttaaataacactgccacaaattaacataataaggtgagtcattagtactcaccttcatttctttatttctatatttctatctaaaataggtcaaattattttagatatatctaatttatacgtattttcgtgctattcccttaaactttgaatgggctttgtttaaaatcacagtaaatctcagtcaatttattaacctaatgcgataaataaatcttacatctttcttttgctcttgagttgctgaggtggttatgactgaacaatctgttatccaacgttgtcaacaaatcgtagaaaatccaaccctttcccccgaacaaaaacgtcattttctagcattagaagcggaaaatatgttgccatacccgacattatctaacgaggcgagccttgcgctaaatgaacgggttatctgcgatatgtatgaaggtcatgccccttataaaccacgttatgtattacctgattacgcgaaattcttagcacaaggctcgcgctatttagagcttgaacctgcccaagattttgatgatgcgctaaatatgctgactatcctttatcatcatgttccttcagtcacttcaatgccggtttatttaggtcgtattgataaaatcttactaccttatgtggggaatttgacgcaagagcaactctatccaaaattaaagcgtttctggcgctatcttgatagaacccttcctgatgcctttatgcacgctaatattggccctgaagactctatcattacacgtttaattcttaaggtagatgttgaacttcaacaagtagccccgaatctcacctttatttatgacgcggcactaacaccttctgatttattgcaccaagcaatcaccaatatttgtcatagtagtaaaccccatattgctaacggtacattgcaagatgctgtatttggtaaagatgaatacggtattgttagttgttataactctctaccgcaaagtggtggcggtagcactttagttcgtatcaatctcaaagaagtagcaaagcgcagccaaaatagtgccgactttctagagaatgtattgccgttttacatgcaaaaacaaatcgagatcatcaatgctcgttgcgaattcctctatgaaaaatcaaacttttttcaacaaagctttttagtagaagaaggtttgctctcacccgatcgttttgccccgatgtttggcatttatggtatggctgaagcagtttctctattacttgaaaaagaaggtcatacagcaaactatggtcatagcgaagcggccaataaacttagctatattattagtgaaaaactggcccaatttgttgcacagacccctgtaaaatatggttggaaacagcgtgccatgttacatgctcaatcaggcataagttctgatattggtactacaccggcgacccgaattccttatggaacagagcctgatcctgttactcatttaatgaccgttgccccccaccatcaattttatacttcaggtattagtgatattttaaccgtggatgaaactatcaaacaaaatcctgatgccttaatgcaactgtgcttaggggcgttttcttgcggattacgtgaatttaccgctaatgtgggtggcaatgatttagtccgtgtcactggctatatggtgcggttatcggatttaaaaaaatataaagaagaaggctctcgcctaaatacaacttggttaggagatgaagcaacaaccaattgccatattgctgaacgaaaaccacgagtgattagccatgaacagcagatgcgcttcgataaataaaatactgcctttttcttgtgttgatggcccaggcaatcgcctcgccatcttcctacaaggatgtaatttacgctgtaagaactgtcacaatccctacactatggggatttgtgataactgcggggattgcattgccacttgccctcagcaagctctctcgttgcaaaacggagtagtaaattggaactctcaccgttgtgagcaatgtgatacttgtattcagcaatgtcctcgccaatcaagccctatgacattgacctatacagttgatgaactaattgcaattacgcgtaaatatgccgcttttatcaatggggtaaccgtaagtggcggggaatctacgttacaacttccatttttaattgattattttaaagcaatcaaagcagcccctgatcttcgacatcttacctgtttaattgacagtaatggcactctttcacttaatggttggcaaaaaatcgccccctttatggatggtgcgatgattgatttaaaaagttggagtgaagaaacacatatttatttaaccggacgtagtaatcaacgtattaaaaaatcaatcaaatggttaagtgagcataatttacttgcagaattacgccttttatatattccagaaaaaaccgattatttagagaatatagaaccgctttcccagtttattaattcacttgatgaatccattccaattcgtattaatgcgtttcatcagcatggcgtatatggtgaagcgaagaattggcgatccgcaaataaagaacaaatcataaatctacaaaatgaattaatacttagaaaagtaaatttaattaaaataccaaatatatatacataataataatttcttactcattattatatattaaattcatttcattttattcaattgactttaattaatacagaggttaacctccagttaaaatcttatttttggtatataaaatgaaaatgaaaaataaatcaatattatatatattgtgtcctctctatatatggcctattaattgctacagcaattataatataaatgatatgggagactcaatttataacccttttagtattgcaaataatgcaagtcaatattatgaattcaatcataatagatatgaatacattaaacatctccacggccgtgtcttagataagcatagttacaaccaacagttaatgacgccgtttggaagcacttacatatatgcaacaataagtgatgatacactttcattatataatcgtatagctgatgaaggtgaacgtaatattcaaaaaaagatacctaattataatgttagagaaaccgtttatttctcagaagaactcttaccaaatgaattatttattagtatagatggcggaaagaccataaaaaaaataaataaagaaaataatccgcaattagatcttctttacctttcccatatttcaaaaaatagtaaaactgttgttgggtatgcctttgcaggtgctagagccagattagagcagatggttaaaaataatagtatttttgaagatactatcggttgtggtacatacaatggatgttatgtatttgcctataacgtatataacaatacattttctattttagatagaaatatggagattagatatttaacgaaagatggtaattttattttatatgaatacaaaggtgatgagagaaagaagctatatatttatgatatctataaaaaagaaaacttcgaattaacattcgataacgttaataagtatttagctaatcatctagaaaaagcaattttactttcaccaattactgaatatcctttcttaaagggaataaaaagaagaggtgttgatattcaaaaaatcagtgataatggtcaagtctttattggccagctaaaccgagatttgcctaaaaagaaattactggatagagaatatcctaaagttgcctttatcacaacagcatcaggccctatacgagaacttagtctctctgaatttggatcgacaaaacttgcagatacctcagcagatgggaactatagtgttggctggggagatgtttggcataataattatgcaattaggttacctactagaacaaaaacttcttcagcaatttttagtcaagcattactctatgacttctctaatgataaactcatcaatattggtaacctttctacaaaaaaagaagaatcggaatttagaaatgctagagcacttgatattactgctgatggtaaatatgttgtagggtggtctgaaactgatgagtataacttaaaaaccattccaaaagatctaacaggcactggtcctcatgcctttatcatgtttcatcgtcatggttttatttatttcaataatcatatgtatgacttaggaacacttgacgggggaaaagattcagaagcacatgccatctcagatgatggaagaatcatttatggtgtagccactaatgaacgtaataactggcgtcaagttatttggagaaatgatgaaatcgatgataaatatttcaatactgaacaacaagaaattgcagatgaaaaagataagcaagctgagcaagaaaaggctgagcaagaaaaagcggagcaagagcgcctagccagactgcaagctgagcaggaaaaaacggagcaagagcgcctagccagactgcaagctgagcaggaaaaagcgaagcaagaaaaagcggagcaagagcgcctagccagactgcaagctgagcaagaaaaagcagagcaagagcgcctagccagactgcaagctgagcaggaaaaggcggagcaagagcacctagccagactgcaagctgagcaagaaaaggcggagcaagagcgcctagccagactacaagctgataaagaacttccccctgtagaagatgaacaagtacaacaggctaaagcaaaggtaaaagagaaagaaacagcaaaatcatcgacagctatcagtaaaccaatcgatgtagaaaacagctataaatccatgcaattaatggctgaaaatagctataaacttatcgatatgcaacagggtcaattgcgttatttagcttccgccacctgttctgtcggtactgaaaaagcatgtcttagtggcttcacacactatcaaaatattgataaagccaacgctatacaaacgggcattagtggagcttatcgttttgatatcaatcaaacaccattagtggttggtcttgctattgatagcgatagctactcttctttacccacaggctatgaatatcaaggataccctttaccgttaattggttttagcgttgatttaatcccgtcactaaacccaacctcgaatggcaatgcattacatctttcattaaaaggggcatatgtaaaccgcaaagtcacgattaaaagaccaatattagataataccgaagcgggtaaaggccacgcaaagatctccggttattatattgattttcaaggatattatccttacacactcaataaccttatcactgtaacgccttttgcaggacttacttttaatcaaacatcacgctctgcttatagcgaaacacaagggactaaacttgcagtccattatcaagaacttaatgcacattcattgcttgcaaaaataggattaggaatagagtatacagtcaatgccaaactcaaactggacagcaaagcgggtttattatggcatttatcacatcaccaaggtgacttccaaagtcatattgattatctaggtcagcaaaaaattaactataacgacaacaaaaaacagttagcacagcgtccatttgctagtgtagggctaacttaccaactagataaacagtcatctgttaatacgacaacaaattggcaaatgaccccttatcgtaatcaagatattcatatgggtattggttatacatatcgtttttaattccttattattattataattagtagtaatagtttgcttcctatatttcaaaatacaggaagcttttttttattaaaatcgctctagtatcctttttactatcaacatattttttccttatctacccaccatattctggtagatactttttctagtaaggctttattgtgactaaagataattaaacttaaaggacgtttttgactttcatcgattaatacttgccaaattttggcttggatctgtgcatctaattgtgcagtcacttcatctgcaattaataattgtgttcgaggatcaagtgctcgtagtaatgcaatacgtgccaattctcctcctgataactcattaggcctacgggttaaccactctggctctatcatcaatttttcaagccacaggctatcaggcacccatgcatcacgtacactctctccggttgttctaaatggattaaaacatttatcaggatgttgcggaaccaattgaatgggacaataacctttcttaggcagaggttgctgattaaaaagaatttgcccactagtcggcatttgccattgtgctaatacacgacctaacgttgtttttcctctaccacttggcgcagaaatgcctaagcgctctcccgcctctaatgaaaaagagagatcatgccataacatcttaccggcttgttgcacagagagttgttgtagcgctaaaagtggcataaaaataacctcaaaaatagggttctctaagagaaaaaggtatataaagaagataatctatcactgctcaatatgggtatgggttgcaagccccctcttgtagatctaaaaactgctgttcaggcagtgcattccacaatgtttttagccattcactcccaccatgatgataaagcgctttagcagcgactatctcatttagctccccttgcctcaacacagcaatggtatcggcataacgagcagccaaagctaaatcatgggtgacccataggactgatttaccttgatgacataactcttttaaatgctctagcaataaacaagcgtgttcatcatcaagccatgatgttatctcatcagccagtatatattgtgcattagataatgttgcattgcaggcgagtactcgtttagccattccccccgataattttgcggggtaagttttcactaacgagctagagaggtgatataaaccaaattggtgtttaatatcttcataggtgatatcagcaccacttaaccgcgctgaacggcccagttgttcaccaatgctaattaacggattaagcgctgttacaccttgaggaatatagcaaaaagtattaccacgataagcaataagctctcgctcggttaacggatgcccattaagtttaattgtgcctcgggttcgcatattagcaggtagtagtcccaatgcactttgcaggagtaaacttttaccttcaccgctgccccccactaaagccagcattttgccaggtttaatatcaagagaaatagattttaataaaggctgccaagtgcgctttcctaaccaacgaaactgcgcaatatcaatggaaagctgttcaaaacttaacatcctgcccctcttaaccatagttgttgcatggctttagcaaattgatcaaatatcaataccaagcacattaaaattaatccgggaaaaaacaccatccaccaagcaccggtacttaaataacgtaaggcatccgctaatagcaatccaagagaaggctcatgcgctgcttgcccaaaacctaaaaagctcaacgcagcactatgcaataccgcatgtggaaacataagcaacgttcctacaatccattgcggtaataacattgggatatagtgttttttcacacactcaaaaggtgtattgccaatacggcgagatagcatcacataatctgcttcacgaatacgttgaatttcaccacgtaaaattagggctaatttgggccaatgggttaatgcaacagcccagataacaccttgctgtcccccacctaaagtaaaacagatcaagatcaacaacagtaaatgaggtaatgctaacaaggcatcaaccacccctctgaccaataaatcacaatggcgattaatggaggagatcccagcaaatatcaaagcaatagcaccactgacaacggcactagtgacaccgatatttaagctacttaacataccttgaaaacagcgtaaccacagtgaacggcctaaattatccgtgccaaaccagtactgagttgatggcgcttggtttctagctaaaaaatccatcacaatatcagtatgagaaacagataagccataaataaccagccccactaatacgattgagacaaatagcagtctaaataaaggcttattgggatcgtaaatcataagtcgcgcaaaattcctttattaattcgtcgtaacaagtagttagagatactgtttccaaagaaaatgagaattgtgctaaatacaacaatccccattaatagggggatatccccacgcaatccggcatctactgtcgcttgccctaatcccggataagcaaaaaccttctccgccaataatgaaccacctaacaattcaccaattgatgcaaactgtaagcaaagtgcgggagtaatggcatgacgtagaacatgaaaaagcatcatagcccaacctttatcaccttgggctttagcaaaatgaataaattcactgcccatcacttcagcaacttttgcgcgagtatgcagtgcgatattacctgtacctaataatcctaacgctatcataggtaaaataagatgcgaaaaacgttggcccaatgtggctgcttcagcactactgcccatcggccatgcacagcaaataggtgcccagtgtaacgttaccgaaaacagcgataacaacagcaatccaacccaaaaagtcggtaatgaggccagcaaataagagagggttgagatgatcctatcaggccaacgattaagatatcgtcctgccactaaccccattaacacccctattacacctgaaaatagccacgcagaaaaaagcaggataaacgaaggccctgcccgttggcgaataacatcaataaccggcatgttatagagtatggaataaccaaaatcaccttggattatctggctaaaccagagccaaaaacgcatccatagtggctgatccatcccccagcgagccgctatcagcggatactgctcaggcggaacgtttagcaaatcactaccgatataggccttgatcggatcaatcggcgaaaaacttaataaaataaaaacacctgctgttgttaccagcagcaggcataataatcgcaggaaaaatcctactgtttgacgtattactgacaagtccacttccaagtatctacgctatttaataatgaccatgaaccgtgaatttccggagcgccagtgcctaaatcaacacaaggatcggttaagtaagtatgctgaatattcattaaccaagcccaagcagcatcacctttgataccgacgccatttttaccatcccactctaccgcttgccaatgtggtaccgcttgttgccatgtcggtgcatctaatgctgcttgtaaatgtttttcaacggcaggatttttataatacccaggattatagtaacccacacctgcggcattcatactatagtgatgatagagctccatcggatcaagacttccccaaccaaacaaagtcgggtttgagtgcatataacgctctacggtatcccagcttcctgacttaagatccatttgaatgccaagaggttgcactaacgcacgaattgattcagctaaatcgcgacgagttgcatcaccactggtgtaccagagtgttaatttcgcttctagaccgtctttttctcgaatgccatttttattgagtttccaacccgcatcatcaagaatttgtttggctttttcaatatcaccatctttaaatgcagcctcggtttgatcccaaggtaatccttttacgccggtataagcaggaactgcatatccatctaatacttgctctgccagtaattggcggttaagggcatagttaatcgctttacggatggcgatatctgcagtgatatcattaccgatatcatacccttgtgcatttttctcacctgatttcaccataggaaagacgataccacgattttcaacactggctctttcccacaattttacattaggcaaatttttagcaatggctgcggtggcaggaggaatacgaacaacccctagttgtccactttgagcggcagcaaaagcggcatcttcatcaagaaaaacaaagataagcttttcgaaatcatttttcttacccgcataataagggtttgcctcaacgatgagttgctgacccggttgaaaactgaccatacgataaggaccggcaccaatcggcttttgtgcataggttttttcatcatatttatcagctgaaacaatgcctagcgagcctaatacattaacaaaagtactttgaggcgcttttaaagcaatagtgacatgtaaatcatcatctgccgttgcagaaagaaagtttcccatatccactttaccgccacttgccgcagcattgttataggtaaaggcaacatcttttgcggttaaaggggaaccatcagaaaatttcaaatctggttttaacgtcagcttccatgttgtgccctctgcactaggctgataatcactgagcatattgctataccaactcagatccgcattttgctttaataatgggctgtgtagcagtaagtagctaccatggctccaccctaacatgggatcaaaaccttctgtcggctcttcaccaatggctagttttaaggtttgtgctgaagtagtaacaggaacgctaagtgcggctaagcaggataaagcaataaacgattttcgccaactaaaccgaatagacataaatattctccgattttttagatacgacttatcatcagtctcaatctgtttgaaagagacagaaaagaaataagttaactgttgttattatgatgttctgcacattgatgcagacaaaaggattaattgcttggcatcataaaagcttttcttgaattactcgaataatatccaacattttattgattttacataaactttcatcaagcaatagcgttcaatatgacaaaattttaaatagagcacagtttttttctaataaatcagttatataggttatgctcattcttaatcatgagcatataacaaaataaattgctatttttacgaaataacctaattttacgataagtatattaatgaaaaaataaagggtgcaaattattacacccctttatatttattctgctaatatttttttcagtcgaaaataacgccgacctaaacgccattttaatctaaaatctttcgcatttttccaaattaatgcccaaattccccgctcaaaaaataccttaactatctgttttttggtttctggtgaactaatcgcatcaatagaatgaataatacctaaaccttctttggctatttgccaataacaagcattgatcgtttttgctatctcagcatggcgttgattaatagcatccagcatctcaagtattttcatataattataaattgttcttacatgaatacgatcatcgggtgtcgtatgcgacacggagccagaatgaataaaatagtcgtaataacgctcatcgatatattttacccgtttcgccgttaataacacttctgtcgtccaaggaatatcttggtgatgcaaacccggctcaaagtaataaccatgctccaataaaaactgacgtcgataaatatttagccatgtaacatgtaagaactttttcgattcaagagcacgttcaagccattgaggcccggttaatacctctgtggttgttaaacgcgttgaaggaaagatagggcgtgttggtcggtttttatcatcataaacataattcccattacaggttgccacatccaaattatcggcttgggcaatttcaagtaatcggggatacatgcgtttatctatcacatcatcaatatcaggaaaagcaacgtattccccctttgcaacagcaaatcctgtattacgcgcaacggaaacaccttggttttcttgtgttaaaatagtgacattgggaaagtgtttttcccatttatctaagatctgacgagagttatcagtagagccatcatcaactaaaataagttcccagttttccagttgttgtgcatgtaaacaattaaaaaactgtggtaaaaatttttcaccattaaaaaccgccaccacaatacttaattggggaaaagaagaggacataccgaaccttttatttttttaataagacagaaatattttgtcgtgaacatttttgcttaagggcattaagggtagcaaagatagttagcttaatatgaagctaatcttgctatgttacacttaacattaatcaaaaagtgcgctttttgagccaattaggcctctaaaattcactagttaggctaagtataagtaattttgtcttgatactgatgaagaaagggttaaggatgtgcgttttttaaaaaagataggctcaagatgactgtttatccatgagtgatataagttacaaaactgtctttttttggcggttgtgacacttatatcactcattaatataaaacatccgcagaacggatgttttttacttatggatacttatttatactttatgttttttatactttaatttttctattcttcgatatcgtcttcatcacagacttcaagctcaggaaagtaatcaactcgccaagacttaatgccttgataaactttatcaacagcgtttcttaccgcttcggtcattgggtaatagaatcccaccagatcgggctggatccccaagaaagtaatatcggggatatcgtcctttaattgatctatcagaaaatttaacggcatgttatgggtgctcataataaacatttctgcaatataatcaggatctattacccttatttcaccaggttttaaaccaatatcagccgcatcaacaatgacaacacattgcggttgtaatgctcttatttgataagaaacattctctggcgcacttcccccattgataaccatccaaccatcaatcgggtttgcttccattaagtccgctaatagaggaccggctccatcatcccccatcatgctatttcctaccgttaatacgaccttaggtgctgtcattgtttcactcatggttttctctttactatcaaataaatcgctggctctataacaatttcacctaataaattaatcagcgtttggctccactcactaaaaagtggatcatcacttttggcaataggatcgaaagctaaagctaacatgtgagtatgttcagaattgatattgatctcaccgaaagttagcaatccttgcatttttcgttttgcttccccctcaggtaataaatcaatccatgcttgatatttttctaaaggacaaaccaactctgtttttaagcagtcaatcatgccgacgtgatgaccaatcgccaacgagtagtacatcacttgttgcgcctgctcaggtatatcatcatcgctatcaacaaacttttgtcttaatgaccaaaagtaaactttagcgtcatcagacatgaacgcctccttggtttaatgaatgcaccagtcgttttacaatttccgctaaacgaggatcattcgcttggcgtaaccattcatcaacacgcccactgacttcttgtactgtggcaccatcaagtaaagtgaggaaatgatcactaatttgtcgcccttgataataaccagcaagacgacgagcttcacgctctatcattacgcgtgtatcaagagggatcgacggcagtaacagtgacgcttgctcattatccacttcagtgtgattttgaccttttagtttttgatctaataagcctaatgccacagcaaaaccataaatagttgctgcaggtgtcggaggacaaccagggatccacacatcaataggaacgatggtttcactcccaccccatacacaatagagatcgtggaatatcccaccaccacaaccacaagccccataagagatacaaattttgggatctggtgctgattcataagcacgtaatgccggtacacgcatttggcgtgttacggcaccagtaaataacaaaatatcagcatggcgaggtgaagcaaccaccttgataccaaatcgctcggcatcaaaaacaggtgtaattgcagagaaaatttcaatctcacaaccattacaaccaccacagtcaacacgataaacatacgcggaacgttgaatatctttcaataacgtttttttcagctttttcacctgatcacttaatgtgataggttggctgacatgatgattgatgggaatttctggtagactcattttttcacactcccgacattgcccatactaatattttcttgaccatcagagagtaggttatgtttacgtttacactcagggcaagtttcaaattgtggacgcattgcctcaacagtttgtgcatcccaacccgattgcaccagcagtgccatagcgtaatcaacagattttctaggtgtaaagggttgatgacactcacggcagcttaataatttaaatgtacctttaatataaagatctgatttttgtgtgactgccgtttcaaacatatctgataatacaattgcccgagttgggcagacttcttcacaacggccgcaataaatacaacgaccaataaataactgccagtgacgttcacccgtttcgaggttggtttccatggtcagtgcattcgcaggacatgcagaagtacaagccccacaaacaatacattgctcaggtgagtactcaggttttcctctaaaaccatcagggagttctaatggtttaaaaggatattttgttgttgcatcgcctgttttgataatggttttaaacaattttaacatcgttcagtccctcacttgagcggcgaatttttacgttcgatgctataacgttcaatttctttataagaaactgttttcgatttacgttttttcacatcgacaagcgttaccctgtcagtacaggagtaacaaggatcgaggctaccgataattaatggtgcatcagaaaccgtatttccttgtaacatataacgtagtactggccagttagcgtaagtggccgcacgacaacgccaacggaataatttttgattatcacccaacatactccagtgaatatcttcacctcgtggagcttcggtaaaaccaagtgcaaatttataaggttggtaggtaaagccttctgttaataacggtccttccggcagattatctaaggcatattcaatcattgccatagaatcaagcacttccttaatacgcaccatcacacgtgagaaaacatccccaccttcataactaaatagggttaatggtaagttgccataatctgcaaatgggtgatcaaagcgtacatcacgtttaaaaccactggctctgatcatggggcctaccggactgaaatcacgcgcgactttcttatctaaaatcccgaccccaacggtacgctgttccatatttggcgcagaaagtaagatgtcgactaattcagtgacttctttgcgcatttctctgactaattggatagttttaatacgttgatcttttaaaatatcgcgacgaataccaccaattaagtttaagccgtaggtcttacgtgctcccgtcagcatttcagcaatctgcatggatttttcacgaatacggaagaattgcatgaaaccggtatcaaatccggtaaagtgacttgctaaaccgatatttaataaatgactatgtagacgttcaacttctaataaaatagaacggatagtatgagcgcgacgaggcacttcaatacctaacgcattttcaacagaagtggtatatgccacgctatgtgtaaagccacaaatcccacagacacggtctgataggaaagtcacttcattatagcccatacgggtttctgccaatttttccataccacggtgtacatagaacatgcgatagtcagcatcaacaatattttcaccgtcaacaaataaacggaaatgtcccggttcatcagacgtaatatgcatagggccgataggaacgacacgcgcatcttgtttgccttcgttcacaaacggataggtttctgtttctgtggttggcgttggacgttggcgataatccatggcatctttacgtaacggatacatatcttcaggccaatcatctggaagcactaaacgacgctcatccggtaagcccacaggaataagaccatacatatcacgaatttcacgctctccccatactgctgcaggaactcgcggggtaacagaaggaaattcaagtgtaataggactaacgtgtgctttaacgactatccagcacttttcaccctcttccatcgataaggcgtaatagacggcataatcaccatttaaactacgttcatcgttaccaaataaaacaggtaaccagcctcctaaaccgtaatatagatactccaccacttcaggcagtgatcccgttttaactgttatcgtcaattgatcagcggtttgtcgctcttcatcaagaatagctgatgggaatttttctcgaactttagcaatataacccgcaccgagttcgtttccctcttttctactgacataattttgatagctcacgttacttctcctgaaccgatattgatggattgctgattaacgttgttggccatgtataatttggtgatccactctcatcgatattcatcacgatattggctgcgttctccaataactcactgactggcttaggaatatgtgttcccattaacaacataagcgcaatcaaaatgatcatcggtagtgtggttaacagacctaattcacctttggcaaccacatccggttttggaccaaataccgttttagctaccatacgaactaatccacctaatactacggttaataacaataataatagaattgttaatcccatatgcttagctgctaagcctgcaacaacaatcataaattcactgataaagacattaaatggtggcatgccccctaatgccaaagcaccgccagcaaataatgcagcacttaatggcattactttaaacatacctttcacgacatttagatcccgtgtaccgtatttcagtaacacgttaccagagccgcagaacagcaatgcttttgctaagctgtggtttaacgtgtggaataaagccgccaaaatcccaatcgggccaccaatacccagagccactgcaattaaccccatgttttccacactggagtacgctaataagcgtttcatatcgcgctggatcagaataaagaacgcggcgatagcaacagagaggaagccaaagattaacaataggttacgagtgaattcagtgcctattgctgcatcaataataatgtagtaacgaataatgattaacagcgcacagtttaataacaccgcagataacagcgcactaacagggcttggcgcttcactgtgagcatctggtaaccatgcatgcattgggaataacccggttttggtaccgaaaccgatcaaaataaatacaaaagctaaatgcatcagtgttggatctaactgatgtgtatatttcaacacttctgtccagaagatggcctgatcaggatcaggcataaagcttgctgcattggcataaactaaaattgtgccaaaaagaccaaatgcgacaccgacactacagataataatgtacttccatgcagcttctaatgaagagcgttgaccataaatccctactaaaaaagcagagcttaatgttgtggcttcaatcgcggcccacatcaagatcaagttattactggtgatcgctaataacatggtgaaaaggaagaggtggaagaaaccatagtagttacataaagtacgaacagaaatttcgccctcatccacttcatgattcatataaccaatagaatacaggccggttaaaaaaccaatgatgcctaaaatggctagaaatagtgcccctaaactatcaacatgaacccatttcgctgccgccagtatttcgccatgggacatcacatcagcaacagtgcctaacgcggcaatgactaagacaaaaatacctatagtatgaatgcctgtaacgataggacgtgccgctgctttcaataatgggcttaaaaatgccaatatcgaaaataccagcggtgcaaacattaagattgttaacatggttgtttgattcatctcctcaccccttcagcgcggtcagttgatccacgttcagtgtgttgagcgtgcggtaaatcttacgcgccaatactgccatgacaatcacagcaaaaatggcatccgttgctataccaatttctaccaactctggtgccctccacgctaataaagcgagtgttaagtgagagccgttttccattaagcagtaaccaaatgcttgttttagaatatttcgttgagtcacaatacacagtagacctagcataaaatggcctaaagagaccgctaatgcaggtttcaattccgccaccataggtatttgaattggctcaaccacaaaccaacataaaatcacaatcacggcggctaataacatcaataatgctggtttaatgacactgatattggcgctcggatcggataatttgcggaaggcaaatcctaagataagtggaacgagtagaactttggtaaagaaggcggttatcgcccaaagtgtcagttgatgtgcatctagcgtatttgctaaagtgacaaaaatcatcaccaaaacaaaggattgcagagcataaaaccaacaggaagcaataggctttcttgcgcctatcaccagtagcgaggtgatcatcattaaccccgctaaattattaacaataagtgctccagtcatgatttatccccttatcctagccaagtcacagcaataacactggatgcgaaagacataataatcagtattccaatcacaatttgcattgccataggaaccggttgtccttgcgcaacttctttacttggttctcctggcaccacacggccaaaccagtagataaaccaagtgaaacttgcaacagattcaatcagtaccagaaccataataggtgtcattacccagaacacactcgataattcaaagcctgctgcaaagatagggaatttactaaagaaaccattgagtggtggtacacctgcaatcgctaacgcagcaacacaaaagcccacacccagcaatggatatttattaattaacccttttaagcgcggtaacatacgagtaccacagctataactcagagcacctgcgactaagaagaacaaacttttagcaaaagcgtggttaaagatataagccacaccaccattaaaggcttcacgaggtccaaagattgagatagataacgcgaggaagatataagaaagctgtgtaatggttgaccatgctaacagacgtttcatatctttttgtggcagatacatcataaagccataaatcagagtgataaccgccatggcgatccccacccaaccaatgatatgagggacatcaccggctgaaataatggcacgagcaaagatatacacacccactttaaccattgacgcagcgtgtaagtaagcacttacaggtgttggtgcttccattgcatcaggtaaccaagcttgtaaaggaagctgtgctgatttaccccaagcagcaaacagaataccgccaaagacaatcagttttgttggctcatctaatgttgctatcgcagttagttcaaacgaacccgtacttacaaacaaggttgcagctgcaagatacagaccgattgacgcaacatgagtaattaacaatgccttcattgccgaacgcaatgacttctctgattggtaataaccaattaatgcccaagaacaaccaccggtaatttcaaaaaacagcagttgccctaaaatggtagatgacagtactaaacctgccatagcaccaataaagatcaacaggaaagcataataacgacgagtcccatcatgaggatgctcacggttaccgttagtgagataacccgttgaataaaaactgacgagtaatcctaagaacacaacggcaaaagcaattaaggtactgacgcgatcaatggtaaaaccaaatagcgcaacatcaccatattgtactagcgtaattgtggtatcgactttaccttcagcgaggaactgccaacctaaaacaacagtacctaatgtggctaataaagcgaacagtgtacataaccacttcgccatccgatttggcagtatggacgtaattaacgcccctgcaaatgggatgagtaaggtcgcaagagctatattttccattgcaatcatcgctccttatagaccagttaaatagaaaacaaaagccagtgccgcaacaccgaaccctaaccatgtcacatgctgagtcagtaagaagcgaccacgcgctaaactgttttcaactaatgacgctaatacaaacacgaccagcaatttcacggccattaacactaaggcgacaagaagcgcgacaaaagtaaattcagtcgctttgccaaaaggaataaatacggcaaggaacagctcagcaatcaccacttgttttaaaccaatacccagtttaaccatggcaaaaccagagccggagtactcggttagtggtccttcttgtaattcttgctctgcttccgcgacgtcaaaaggcattttgcccatttcaataaatgccgcaaaagcacaagccaataaggctaaaagtgtagctgtgggtgatacccaaccttgggcgagtgtcgcactgatagtgccgacattggttgaacccacaatcaatgccaccacaatcaacgaaagcactaaaataggctcaactaatacacccaatgtcagttcacggctggccccaatacccgcaaatggactacctgaatccaaacccgataaagagaaaaagaaacgaaatagcgcaaacagataaattaatgcaattaagtcagctgcaccgccaaacaaagaggttgccgtaaagacaggcaatgccattgccactaataacatactgcctaataacacataaggcatcacttggaagatcacgccggattgctcaggggctacggattgacgtttaagtaatttaaaaatatctcggtaatcctgccaaataccaggaccttgacgcgaatgcatcttggcacgaatttggcgagaaatacctgtacataatggggttatcgccagcagaaagagtgcttgaataaccgcgaatattcccatcataaacgaaggtgtttcttggaaagtcatcattccctctccttacgctgcgataactaaaagcaagatgaccagcgctgccaccacgtacagacaatagagtctgaaatcgccgccttgtaggcattggatacgtttagcaaaacgttggataccacgaaccaatggataaataatgctttcatcccagaatggttcgaccttttcagcaccgcgctgtgttttattaaagccacgtgaaagccaaggtgatggatcaagctgtttacgcatacgataaagtggtgcaaacatactacgtagtgcttgagtaaagcccccagcggacaccgccatgtctttttcccagacataaccacaagcccatggattacctttacggcgaaatgcaggttgaccaccttttaagccgagataaattaagaatggaattagtggtaaggcgattaataaaataaatgttaaggcaggagagaacatcgcttgtgatgcactatcagggactaatatcgcaccttgagtcactgttaatgcactggtttcgctaagtgacattgcaatattggcaataattggcgcaacaaaagccgcacccacacctaatacaacacagaaaagtgctaataaccccatagcaatggtcattggcaacggtacttctttagctttagtcgcttgctcactacgtgggccaccgcaaaaactgacgccataaactttgacgaaacacatggccgctaatgccccggtaattgccaacataataatggcaataggaccacttaagcgcatgacaaagttaccatcgtaactcatcgtaaatagtgattgataagtataccactcactcacaaaaccatttaatggcggtaatgctgaaattgccatacaaccaattaagaatgccgttgcagtgtaaggcattagtttggctaatccacccatcttatccatatcacgagtgtgaatttgattaataatggctccggcacctaagaacaataatcctttaaataccgcgtgatttaataagtggtataacgcaccaagcagaccgagagcggcaatcactggatgatcggttgccatacctaccatgccaactcccacgcccatcaagatgatgccgatattttcaacggtgtgccatgcaaggagacgttttaaatcgtgctctgctaatgcgtacataacccctaatacagaagagacagcaccgaatgcgagaacgacaattccccaccacatttgtgaagcacctaataaatcaatgcctactttgatgatgccaaaaataccaattttcaccatcaccccagacattaatgctgaagcgtgagagggtgctgcggggtgcgcttttggcaaccaactgtgtaatggcaacataccggctttggcaccaaatccgaagaagcccagtaagaacaccacagaagccattgcaggggaaagagaaagttgacggaatgaatcaaaatcaaggctaccgctttcacgccacattaagaagaaggctatcatgattagcacagagcctgcgtgagcgataaagaagtagagtaaaccggcgtggatagattcgtcatcttggtcagcgatgactaagaaccaagatgctaacgacatcatttcaaataggataataaagtaaaacgcattatccataacaatcagtcctaccatggaagcaataaagagattcataaaaaatcccatactccatgcgccgcgacctttgtattcttgaacataagagagtgaatacaacgcacaaacagtgacgagtaaagaaatgacaaacaccataaaggcgccaagcatatccatacgcaccacaaaagcggcgaaatcaaatggcccagccatagcaaaactgattgtttcaccatttaaaataactggtaatgcgcttaaaacacctaatacaccaccgatgattgcgctgatccccgatattaggattgccaatccttcctgtttctttaaaaacagtgcaataacgccaccaacaacatacaggatgattgaccacatcagtaactgaagaggttccatattacttgcgctcctgtgtcaacgtagatagatcatcaagacttgtcataggttccatcacagagtctaaacgacgcgctttcatctgctcttcaaggctatcttcttcaactagatgtaaggcatctgtcggacagacttttacgcaagcaggcccctcatctgagaaagcacacaagtcacatttcactgctattgcgcgaatacccgcattccatgcaaggaatggattggtagtaggaagacttgcgggcacatctgccagcatctcttcaggcacaaaatggtcaaacacagccggtaagttaacgggtttactgcctgatggtgtaatcgcaccaaaaggacataccaaaccgcataacttacagccaatacacaagctctcattaagaaagatcatattatcttcatgagtaatggcattgactgggcacacactagcacaaggagcatcctcacaatgccgacaaagcatcggggcggtctgatcctccacttttaccactgtaagacgcggatgcgcctgtaatcccacagcttggtgtacttccgaacaagctgccatacaggtattacaccctatgcatcgttgtggctctgcaataacaaagcgattcattcgccacatcctccgagaaaaacgtttaacagctcacggctgtcgttaatttttctctagatgaagcatatttcatgccaagagcagtaatattttatttttgttaaaaatcaatgcattataaataaaaattaatttacttgatgacgtgtcgacaattatgacgttgacacttaagtggtgggaaagagtgatatgattgaaaaagcctgcaaaagcaggcttacaaaaaagggattagtcagtataaatgcgcttttcaacttctttcatggtctgtaagccacattgtaaatcatctggggtcgcttcagaaaacccttgtgtaaaggttgcagataaataagcatctaccatcatattggctttaaagggagtaatcagtaaaccccccatggctagcatattgcaattattaatcactttacaaaaacgcgcagtggtaacactctcacaaaccccgcaataaacatttttatgtttattagcactaatacttactcccatccctgtgccacaaaaaacaaaaccaatatattcaggatgttctgaaataatagcgccaactttatcaccaacatcacaataaccaataggtcctgattcggtaatatcttttattgtgtaattttttgcttgtagatgagatttgacggcatttttaagttcataacctgaaggatctgcccccataacaattattttctgttccatatcgcctcctaaataaattgagagtcatggtcaaagaaaagatatctgattgataaccattaaaaccaaataaaaacatctcactcaatgagttgttacttattaaagtatagacgataaatattttatttatattcaaaaattttaaatttctctgtaatcaatttagagaactttaaataaccatcataatcataaggttttatttttgatgaaaatcaaaaaaaaattaatgacaataaaattgtgtttataggataggaaaaaattttttttaaaataacatactaatctgattatgaatttacacttaagagaatttacgtatagaaaaaggaccaaaaagcatcaatctagtataaaaagtgctaattatcagataaataagaacgaaacgtaagaaaagaaaaaataaaagagatattttagatatagtattatattggaaatagtttccctagtacaaaaaataaaaataaaaataaatatcaataatattacaggattacagtttttatctatattcttcaatatctctaaaaggaaaggtcaaaataaattaaataaatattgctgtggattatctttaccaaaataatcaacaactacattgtaaaaaaatggctattttttaccaattccaatctggcattgctcatgctgttttggcataaataaagaatgaaataatatattgattttatattatatcacttatctatataacgattttataaaacaccgtattaaagtaaattaatcaatttttttaaagataatttgttatatttatcaaattttttgcgtataaaataaaaataccacaatcaagagagcatatgtggtattttatattggtataaacgttcgggaaaataatcgcgatgattattttacgcgtgatacatattcaccagaacgcgtatccactttaatcacttcaccgatttgtacgaacagaggtactttaaccacagcgccagtgcttaatgttgctggtttaccgcctgtacccgcagtatcccctttcagacctggatcggtatcaacgatttctaactcaacaaagtttggtggaacaacagcaataggacgattatcccacagtgtaacgatacactctgcttggtcaatcaaccatttagcattttcgccaaccgctttttcgtctgcagctaattgttcaaaggtttcgttgttcatgaaatgccagaactcaccatcgttgtacaggtaagttaagttgatatccatgacatctgcaccctcagcagaatcagtagatttgaaggttttttccagtaatttgttagaaatcagtttacgcagacgcacacgagcaaatgcctgacctttacctggtttcacaaattcacattcagtaatgacggctggctcgccatctaacatgattttaagacctgaacgaaaatcgttggtattataagaagccatgaatatcctctaacttttttaatttaaaatggcatagccaaaaatggcacacattgtaactcataatcacaccaccagagaagtctggttaacacaactcgcgcaggcaatcagtgatcctgttgaattactccaacttttagcgctggaacatcacgctgaactacaacggggtgctcaggcgagacgactttttcctttacgggttccccgtgaattcgttgcgcgcatgaaaaaaggcgatcctaacgatccattacttttacaagtattaactgcacatgctgaatttaccctaacgccgggattctctacggatccattagatgagcaacaaaatgcggtgccgggtttattacataaatatcagaatcgtgcattgcttttggtcaaaggtggttgcgctgtcaattgccgttactgtttccgacgccattttccttacgaagataacaagggaaacaaagctaactggcaaaaggcaatagagtatatcaaaaataacccaaaactcgatgaaatcatcttttcgggtggcgatccgctgatggccaaagatgacgagctagattggttaattactcagctagaagccatcccccacattaaacgtttacgtattcactctcgtttacctgtggtgatccctgcgcgtattactcataggttatgtcagcgcttacagcagtcacgtttacaaaatattatggtattgcatatcaatcatgcaaatgaaattgatgatgcgttaagagaagcttgcttaaaactaaaaaatgcccatgttacgctattaaaccaaggggtattactgcgaggggttaacgacaatgcccaaacccttgctgatttaagtcgtgcactatttgacgcaggcatcatgccttattaccttcatgtgctagataaagtacagggagcggctcattttatggtaccagacagtgaagcgcgcgaaataatgaaatcattaatgagtcttgtctctggctatatggttcctaaactcacgcgtgaaattggaggagagccaagcaaaaccttgcttgatttaggcttacgacaagtatagtggataggaacttataaaataacattgaataccgttatttggcctagacaataggcctatccggtaaaaatagtagtacctcataaaaagcaaataagaatgatcgcgttcttatttgcccaatattacgttaatgcatattactcgactaaaatcgctacatcgacactgcccgagtatctatctgcgggaatattactatttgcacaaagattaaaatataacgtttgattaaaaactttgggcatagcattaactaatttattactaccgacataacttaacgcatcactggaattaggttcacaaatagtattttgttgttggctagttagcgaagtcaccacataaccgctttcctgcgctttagtgccggttaattccattcccgtattactgcctttgactaaggtattaaacggtcttaatgtgatatgtacattcccagcatagggacaatcaacatttatactggcaatattctcatcgagtttagtcggtgtagcaaaattttgtgctatttgactacggtaattaatcgatgttgctgtttgtggcgtcacatcgcaggcttttaatgtatggactgttatctttgtactagaatctgaaaaataaggcctagcatcaattgaaaatccagaactaatagctacattaaattgcaaagaatgatctctggctagactataatttcccggctctaacgcaccaatagcgtaaactgaatatccactgatagtgccaatagaaagtaacaatacatttttttatttgcgggaacgtcattactctttgcctttacataacagcattgctggttatcaccttgtttaacttaataattataaaaattattgacaattaacggtcaccattcttattgggttttgttgtgatacttcaatcttttcaagctctgaataactaaattgacatgaatgtttgcccgtattgttattccaagtcaccacgacattcccatcattgggtaacccactcatataaagagattgataggcatcaataataccggtatttacctgtttatctttttcatctgtcaaagaagccattgcaccaaaaggtatcgctatattttccgctgtttttatatcaaaaataacctgataacccactttagtttgaaattgtcttgctaaaatagccccttcggttggatagactttcattgacgtttcattaagtgtcacatcatcaggtaatgtgctgacatttacgctaatactgtttgtatcataaggacttaattgagggacaatggcattaccaaatgtatctattttcacatttccattgatttctgcgccctttgctttatctgcgctcactatggcaatactgtcacctaacatccttgataatgtcactccttttgagtgcagaacaacaccaccaataaggctaccattaaagctatttctatttttcccatagctataacccccagaaagcgttcctttacttcctgaataactcatattcatattgccactataactatctgccttgttatctgtattctggtagataccataagagagttgattatcaaatgcagagccatttaaaccggcttgttgcgaagttcttccatcattgctatgtgtcagaagatagcttgcattcatattttgcaagccacttgcatttgagaacacactcagtggcatattcatattaaaattaatttgtctattttctggccatgtattgtcatcactttttaggcgagaaatagaataatctatattaaatgcaatacctttcagaacagtgttatagcctaatgtgacactattattaacacggctattcccccaataacggctggtttcaccacgaagatacatggaaccgtattttcctaatgattgtgaaattgaagtttgaaaactagatttctgacgttggcttaaccaaggtgcaataccttctcgcaattcataacctgagttattgtaatcactaaagtcatagtaatctttagttgaataacgtaatgcggttaaatcaaacgaagtccctgtagataataaactcttagaataacgaacccgatatgattgaccgtgataagttttatccaaattagctctggcgagagtgacgtccgcagataaggcacctaataacccaagagaaacacccgaaccgataacaccagaggtataaccattggcaattaataaaccaccgtatgcagtgattgagttattgataccataactaaacgttcctaaagcaaatttactttttttggaatctgtcgtgataccaccatcatattgccccgcactaaactcatactcaaattgcccttcacgcaacatgataggcagcgatgaataggcttgtgtatatacacgtttagagccatcttcttcttcaatggttatttcaaggtccccaccaataccgccggcggaaatatcattaataataaaattcccaggagcaacaaaagatttatagataatttgaccattttgacgaatggtaacggttgcattgctgttggcaaaacctcttaccacaggagcatatccacgcatactacttggtaacatttgttggttagtggctaaagaaatcccctttatcggaatacttgaaaaaatattccctccagtggtaatttcaccaattttcagcattgattttaaataagcgatatttcgcattacataggtattactaaattcagaatcacttgaagaacgctgatctgaaccactcgaattattataagaataatttgttcttaaacgccaagggcctatatttacaccaccattaagattcaagaaaaagttgttattatggcttgaataatcacctgtcgttctatttttaataaagttagccatataattaaggataacagcactcacgccatcatctaataattctgcgggaatttcaccttgaaagctcttatccatattaacttggggaaaagatgcatttaatgttaatttattaatattaaaggttagccttgaattaggaatatacgcttctatattatcaatttctgtatcttcgggtagatcacttagcttacttatcgctgaaacattaaccccaaatagcttcaaatctttgattgtaacaactgggacaactttaccttctttgtttgctttaaataaaattgtcttttcacctaatggctcagtattaacaaaaacgcttaaactatagtctcctggtgcaatgtagtcttctttgctgaaattacttaaatcaatattgtcgttattatttagtaaaagattcggatcaaagtaattatcagacaatgcgattttcggcattgccacagataaaacacaaagattgatacaaagaattttatgcaacataggtttcataaaccaccccaaagaccacccataaataagaattattgttaagttaatattctttatcttttattataaagaaattttcatcattgaatctccaactcagctttccttgaacatttttaggtgcttcaactgatactgtagagaatggttttaccgttattgctctaccatcattttttatttcaacctcgcccacttttaaatattcaaaagtcatataaagtggtgatttattatttataactatgttctcatttaccttttcaacaataacatcatcaataacatctttattttccaatgccattattgactcaggtctataaattaatttgaagaagaaagtaggtgttatcgttagtgacacagatttcttttcctcaattttactatccttaagaggaactgctctaaatgcaatccaaaataagctttctctgtcttttggtaacgccatatcattagaaccttcactaatacgacgaatattccagctatattcactagagggttctaaacgatacaaaggtggtaaaatcataaaaggtgttctttcacgatctttattcactataggtacatttttatcatcatcattaaataaaatagagctattaattaaataagcactattgttattattttttaaagagatagagataccttttatatcactttccagatagatatatctttttactacaaaagaaaaaccatttttcccgaaatctgttagatccacagtatcgttttctattttttcaactgctttcgatgtgactgaataagatagaaaaaataggcagaatatgactatctggataatatttttttttctacctcttaaaaaagataacatttagtcactccacaattattttattttcaaatgtatttgataatccaccaaaatcatcaatatattgccaactaacctgtttaattgatttatctatagctaaattgagtgacgaaaatggcgcaaccataggtgcatttgctgattgataacttttgccatcgaattttaaatttgataccgtaaaataataaggtgttgggttattgacttgcacattattacctacttttttaaaggttatcttcttagcatgactatctagtgatgttatggctaattcatttggtcgataaaatccttttatgataatttttgttaccatattaatttttagtgataaatcaccactattattttgttgccctctttttgtttcaggtatcaaatatgcagtgaaaaaaaagagtgattcccgatcacttggcaatgtatctaaagagcgtggtaaaatttttatagaaaccgatgactgaggctctaatcgttttaacggtggcaatacaataaaatgttcatcttttttgccatctaaatcagccgttatcatattttgagataaataaagattatctgtatcattatttatttgtacactttgacttttatctccctcagaaaatataatgcgactttgtgacaaagatagccctgcataactatatgatgcagaaaaaataaaacagctaaaaagtaatgaaatcgtttttaatatattcatattttaatcaatcagaaaaaaagctaagcactactgttgccgtaaaagggccaacctctggagtacatccctctttttgacaacgcaactttgctgttaatgatttagtcgagctttctgaggttatattatcccacacaacagaatcatcagaaggtttaaaaacagagctattatttactttatatgttttactaccactgtcgtctgtaagttgaacaccaaatgacccagaaacattgttattaaaaaaatctcgagttccggttaaagtaacaccttgagatatataaacgctcgttccacttaaagaacttgttgagcaattagttaacgagatagggatctgttgactaattttattattttttatgtcattagcactaacagaactagccccttcaccactagtgaaagtaatattatctggaacaacaatttcacacgttttagcgagaaaaacgactgaaaaattatatttcactgattgcgctgcaactgaagcccaactcgtcaataataaacaaagactaactattaatattgacactttttttgtctgcataattaatcctgaatatattcaaataaaatagtcgccgttgaatcaccaggtgtcattttattattgttacgtctaacaaaatcgacgatgtagttaatacttatcgctgaattagagtgagaagaaaaagataactttttattgttttctagaatttggcaactcgcattttcaccttcaagacagccttttactaaaaaaccggtttgggtcgtatcgccttttccataaaaaacctgatctgaatattcagtattcgcgcctgtttttacattaatcgtgatttttttctcactatcaggttcatactctttacaatcgataagataagtaaattgcttagtgccgagactccctttaataggcgcctttattggtgtgtcttctgcatcaccaatagtaaaaaactgttcaaatgagacatgtttactcagctcattactatcgctaaattcacaagtgccacgtgttacattagcagaaaagttgagagtaccattatttgcggattgacagtttactgcatacaccatcatcgctaacaatactgttcttttaaagttttttattgtagacactttctccgcctaaatcgttgataatatgaatattaacagcacctgttttattacttaccacatagtttttagaagaaaatggttctatcatattattaattttatttaattttatcgtttcatttttaacggtaatcttaaaaagattaatataataaggcgtagggttctcaatactgatcccattaggcgttgcttttacaactaatttatcaccggcttcttttgggtttatcgctaaattaatagggcgataaaataccttgataatattttccatcgctatttttatcccatcttcatttttatttgttgatggaatatttcgcgagtggaagtaataaagtgattctctatctttaggaagatttgttggtattatttgaatttttattgtattttcactttccggagctaacctgaaaatgtttggagtaataacaaacataccactcaaaggtggtgatgaggtatccagtttttcggttataaagttagagactaaataaggttgtgcattattatttctagcgctaatagaggctgtattagtatccccattaataataatacgagtctggcttaaaccgacaccggcttgaacctgaaatgataaaaataatactcctaaaacacacaacgaaatatattgaaaaaagcgtattttgtttaccatctgcctatcaccttattgcactgcaactttactattggtagtaaaacaaaattatggaaaaggaataaattcctttcccataacatactaatattagttataagcaacactaaaggttactggaacattaatatcttgtgctttcagtgagtcaccagtttctgtagcaaataaacctgctttcataggaataatcaggttaccttcaccttctgcttttaagttttgcagttctgttgactcatttggtttcagtactacagagttcattgcagttaacttgataccagcttgagttgcaccagcgctagcaaataattgctcattaccaactaggccattaccgcttgctaataattcaatattagatacagttacagcaggatcttcaccttcagctggtttaccaatcttagtacagttgtttaacactaagttgaaatctttttcagatacagcttggttaatattttgaatatcagtagttgcataagtacctaaatcaacacgatcttggcttgcgctgatatcacaagttgctgcaactaaacgtgcagaaaatgtaacgtctgcgtttttagcggccataacttgagttgataaagaacccataagaagtgcaccagcaaccattacgcctaatttattgaatttcatattaacttctcttataaaataatctaaaaattatcaatatcgtaataatttagacccaacgtattgtactaagccaacatgtgatccttactatataaatgatattgatccttacaacgattgtttataacccattaataaaactaactttacatcaaaaataacatcatataatgttgcatttctcagtatttatttttagctcatcagaaaaatgacaaaaataaacattgaaatcacagaaacatcaaatatatatatactcactcactgtataaagtaagcataatatattttttgaaaaaacagcggagttatttaaatcacataattaaatctcaccatattaaaatattattttaagccaagttaaaaatttaatgagaaatattaattcttaaatcagtatattctctgagttggggaaagtaaagcaaccacaatagaaaaaattacatttacttatatataaatttacattatatacatacgataaaataaaaaaacaacctttaaaaacaaatggttatgattttaattttgtttttttattaaaataaccttctgataaatattaattagattatcttttgttgattataaataaataataaaaaccaaaccactctaatttaaatagtcatattttgttatttcttataatttattaatttacttttatgacgcttatataaaatatcttatatagataatctaattatgatatatttttaattttatccattaaaattacaataaaaaaataatcagcatctatacacattgatatataagtatttttattatagtaaatatgatagaacatcatgatagtatcagtatgaaaatattaatatgtgcttctcatttaatataaattaaatactatcacttattaaaactatctattagtcatataattatctatcctagtagaattggatattttattttttaatttattgtattatttgcatttggctctaaaaaaatcctactacgcttatagtaataatcattaaatgatagtttttacggtacataatttacctgattaaaaaataagttttaaaattaagttcagtgtaaagaggagcttcaaacacgaaattgagattttaatggaggaaatatgaatattctcgtcattggcgctaaaggtcgagtaggtcagcgtttaatcgaaatattacttgctaaaggtcatcatgtcataggtacaacccgaaaattatccgacacatcagtacatcatccctcacagtaccatgaaattgaattggacataacaaagccgttatcatccatcaccgatttattgccagacaatttagaggctatctattttacgacaggctcccgaggaaaggatttattacaagttgatttacatggtgctgttaaaacgatgcaagcagcagaaaaaaaaggaataaaaagatatattatgctcagtgcgattaattcattatcacctgataaatggactgaattaattgattattttactgctaaatattttgccgacctctacttacgggatcgtacccagttagatttcacccttgttcaagcaggctatttaactgaaaaacaaggcacatataaaattacgaccaaattggaagataatgctacaaaaggtgaaatcactattgataatgtcgcggcaacattagcagagatattagataagccgaatacatttaaaaaatgcattcctatattagatggtgacgaggcgattaaaacagccctcagtcgaatttagaaacgattagtttactgattttgataaaaaacaatctgaccctgatagacattagggccagatatgttagtcacgagctagcttatcaatgtacacaaccattgtttgttactgacatttataaacttgtccactcattttgctatctagtggcgcaaagctatcgacaatgctacctgcacctgtaccaacattaaaaataacattaccacccatagcggctgctttgttgcgtaaatcattagcagcaccgcgtagtgattggctttcagtacgagagcctgataaccaattattctgaacgccggttactgtgcctaataactggcactcgctgcctggttgcgtatcagtaatttgtacctgtgaacctgcactggtcaatgtatttgttgcagaacagcctgctaacaacaacgctgcagtggctcccaataacaatttaattcgcatgatcccctcatttctttgagtgtccgtttagtcatgacaacaatataccctgtcactcctcttaagcgcaaaaataaatcatcactatcttacattagcctatagtcttaagaggttatttccacttgttacttattttgatttaatgatttagctttaagatagacaaagcaatatctatttattttacaccgctttgcggcttttaaaacatattgtgtgcttttcagacaccacagtgcgagactgggcacattatttggtcgtcgttcttagcctaatcctctgctttaatagcataatcaggcaataggccattgatagaaattattttttgatacttaaataatagggaacattaaatcattatgtactggctcaataataaatttaacattattgctatcatcgttggtgtactgagtatttttactattttgattaatcaaagtttggagcgcgaatatgttcaaatgagccccaaactagaacaaatcgtccatgaaaaagtgagtagcttaaaaaaatcagtcgttgatgcgataaaagggaaaacttatcaagctgctgctatagatatcgaggcagaacagaggcaacaattgttaaagcggatggaacaaatcaaacaaattggtgtagttctgagtgtattagggattatttttactgcaatttcatttattcgacatgaaaataaatactcttgtcgaatagccttagcacttaatggaagtatcctgtctatttctcttttaatgtatgttgcaacaagcattgctagtattgttaccatattacttcttatatggctgctaggtaatatcttcggtttctgttaaagacaataaaaatgatataaacagccagaacgacttattatgtaaaaaaacccgagcctaagctcgggtttttggtgtaaaacagctagctgatgaattacatcatgccgcccattccacccatgccgcccattccaccagcagcacctaaatccattttttcgtctttaggtaaatctgtcaccatagcttcagtggtgatcatcagacctgcgatagaagctgcgaattgcagagcagaacgagtcactttagttggatctaagatacccatttcaatcatatcgccataagcttctgttgcagcgttataaccgtagttaccttggcctgctttcacatcgttaactaccacagaaggctcttcacctgcgttagcaacgatttgacgcattggcgcttccattgcacgtagtgcaacacggataccaactgtttgttcttcgttatcacctgtcatttcacgcagcgcattagcaacgcgaacaagtgcagtaccaccaccagcaacaacgccttcttcaactgctgcgcgagttgcatgcagagcatcatcaacacgagcacgtttttctttcatttcaacttcagttgctgcaccaactttaattaccgcaacaccgccagctaatttagccacacgctcttgcagtttttcacgatcgtaatctgaagttgcatcttcgatttgttgacggatttgagcaacacggccactgatagcctcttgttcacccagaccatcaatgatggttgtcgtatctttgttgataacaacacgtttcgcttggcctaaatcttccagcgttgctttttctaactccataccgatttcttcagaaatcacagtaccattagttagaatagcgatatcttgtaacattgctttacggcgatcaccaaaacctggtgctttaaccgcagcaactttcacgataccacgcatgttgttgacgactaatgttgccagtgcttcaccttcaacatcttctgcaatgatcagcagaggtttgtttgctttagcaacaccttctaaaacaggaagtaattcacggatattagagacttttttatcaactaataggatgaatggattttctaactcagctgtacctgtttctggtttgttgatgaagtaaggagacaggtaaccgcggtcaaactgcataccttcaacaacatccagctcatcttctaagccagtaccttcttctacagtgatgacaccttctttacccactttttccattgcttgagcaatcagagtaccaacggtttcatcagagttagcagaaatagtacctacttgagcaatagctttagtatctgaacatggaacagacagttttttcagttcttctactgcgcccacaacggctttatcgataccgcgtttcagatccatagggttcatgccagcggcaactgcttttaagccttcggcgataattgcttgtgctaacactgttgcagttgtagtaccgtcacctgccgcatcattagctttagaagcaacttctttcaccatctgagcacccatattctcgaatttatcttctaattcgatttcacgggcaacagaaacaccgtctttagtgataacaggtgcaccgaaagatttatctaaaacaacgttacgacctttagggcctaaagttactttaactgcatctgcaagaacattaacaccacgtaacattttattacgagcgtctataccgaatttgacgtctttagctgccatcgtatatttcctttgaattcgttcagtttaagaagatcttaaaagagaaaaattatgcttctacaattgctaaaatgtcgctttcagacatgataagcacgtcttcgttatcaattttttctgatttaacaccataaccatcgttaaaaattacgatatcgccaactttaacatcgagtggtttgacttcaccgttttccataatacggccgttaccaactgctaagatttcgccacgagttgatttacccgctgcagagccagtcagtacgataccacctgctgatttagcttcgacttctttacgtttaacaataacacggtcatgtaatggacgaatcttcattaatagatctcctataaaaaagtccatatcaggattaaggttgataccagtgcctaagatgaaccagtaccatgacgatacaagtgggggcatccaataaaacttcaagggggagaaaagtgttttttttcaaaaaatcccctttttagatgattatgcttatagttaattattttttatcagaaaaatggtcattatcctgatgttcatccttattattcagttgcttactaggtgaatcttctttacgttgatattcaccttcaaaagtactcccaccttgatgggaagaaaagccatttccaccctgtccgggggtataaattttgatacgcgtaatcagttttgttaccaatagcgcttgtaatgggggtaacaataaaagtaagccgaggaaatcagtaaagaagccagggatcaataataaaatccctgccaacaccaacgaaacgcttttcaccatttcagccgcaggcacttctcccatggctaatttttgttgcattgaagcaatatttttcacaccttgatttttgaccaaagagatcccgacacaagaagtcagtaccactaggaatagggttgtaagaacgccaattgaagaggcaacatgcacaaaaatcacagcttctatataaataagaaggcagataacaattaatgggagccaacgcacttggttctccttttataaaaaagattcatattattaatagaaaggagtgtgaaccacctctaagctaacagcttatacactcgctttttcttagtttatctacataataatggggagcctaatcctccttttcaagggagcataaaaagagaagtagaactgtaaaatccatgagatagatcacaaaaagaaaataattcagcgttatttacttataaagtgatccagcttaaaggtatttgcttacaacccgaatatgatcgtgtcagtaccaagcaaaacggtaagttatattacattattaaccgttaacgatatattttattaacaagcgcataactagacagttaaaattttaataagaaggttctcatgtcaaataaaactcgtatcgaagaagacctgttaggtaaaagagaagttcctgctgatgcttactacggcgtccacactttacgtgcaattgaaaacttctacatcagtgatcgtacaatcaatgatgttccagaattcatccgcggtatggtcatggtgaaaaaagccgctgcattagcaaacaaagagcttcacactattcctcgcgaaatcgctgatacgattatcaaagcctgtgatgttgttttagaaacaggcaaacacatggatcaattcccagttgatgtattccaaggtggtgctggtacttcattaaacatgaatactaacgaagttatcgcaaacatcggtttggaattaatgggtcatcaaaaaggtgaatatcaatatctgaaccctaacgatcacgtgaataagagccaatcaacaaacgacgcttatccttgtggtttccgtatcgcagtttataactctgttattaaattaactgagtctattgagctactgaaagcaggttttgatagaaaagcaactgaatttgaagacatcctgaaaatgggtcgtactcaattacaagatgctgtaccaatgactttaggccaagaattccacgctttctcagtattaatgaaagaagaaatcaaaaacctaaaacgtactgctgaattactgttagaaatgaacttaggtgcaactgctatcggtactggtttaaatactgcacctggctaccaaaaattagctgttgaaaaattagcagaagtaactggtttaccttgcgttccagctgaagacttaatcgaagcaacctctgactgtggtgcttacgtaatggttcacgctgcattaaaacgtctagcagtgaaaatgtctaagatctgtaatgacttacgtttactttcttctggtcctcgtgccggcctgaaagaaattaacctgccagaattacaagcaggctcttcaatcatgccagctaaagtaaacccagttatcccagaagttgtgaaccaagcttgctttaaagttatcggtaatgatacttgcgtcaccatggcagctgaagcaggtcaattacaattaaacgtaatggaaccggctattggtcaagcaatgtttgaatcaatttctctattaagcaacgcttgccgtaacttagttgaaaaatgtgttgatggtatcactgctaataaagaaatctgtgaacacttcgtatttagctcaatcggtatcgtaacttatctaaacccattcatcggtcaccacaacggcgacatcgttggtaaaatttgtgcagaaacaggtaagagcgtacgtgaagttgtattagaacgtggcttattaactgaagaacaactggatgatatcttctctgttgagaacctaaaacacccggcttacaaagcaaaacgcttcgatgattaatatttatgtttcataacataatcatgttaaacataagaatgagctcttaaaaatacaaggcacggactctttaagagacgtgcctttttacttgattgtaaaaacaaaaatttaacttatctttctcatttttttaattatctcaaggagtaaacgctatgttagccgtagaattgattatcgttctgctggccattttcctcggtgcgagactaggaggaattggtatcgggtttgccggtggtttaggggtgttagtattagccgctatcggtgttaaaccaggtacaatcccttttgatgtgatctccatcattatggctgttattgccgcaatctctgcgatgcaggttgctggtggtttagattatttagttgatcaaacagaaaaactattaagacgtaatcctaaatacatcacaatacttgcgccaattgtgacttatttattaactctctttgcaggtacaggtaatatctctttagctacattacccgttattgctgaagttgctaaagagcaaggcatcaaaccttgtcgcccattatcaacaggtgtggttgctgcgcaaattggtattacagcatcacctatttctgctgcggttgtttatatggcatcagtcatggaaaaccctgcaatggtcggtgaaggtaatacagtaagttatatcactctgttatctattttattaccagcgaccttccttgctattattctgatgtcattcatcatctcttgggtatttaactcaaaactgtctgatgatgcgatttatcgtcaacgtttagagcaaggtctagttgaattacgtaatagtaaagagcgtagagaaacattaccgggtgctaaatcttctgtaatgctattcttacttggtgttatttgtgtggtcacttatgccattatcaatagcccaagtttaggcattgtaaaagagccgttaatgaacaccactaacgctatccttatcattatgctgagtgtggcaacacttattactgttttctgtaaagttaaaacagataacatcttaaactcaagtacatttaaagcaggtatgagtgcatgtatttgtattctgggtgttgcttggttaggtgatactttcgtttcaagtaatatcgattggatcaaactgactgccggtgatttaatcacaggtcatccttggttattagcggttattttcttcttctgctctgccttattatattcacaagcggcaacagcaaaagcgttaatgccaatggctttagctttaggtgtttctccattaacagcgattgcatcattctcagcagtttctggtctatttattctaccaacttacccaacactggttgctgccgttcaaatggatgacactggtacaactcgtattggtaaattagtctttaaccatccattctttatccctggtactatcggtgtgatattagcggtcggatttggtttcctcttcggcggtatgattttgtagtttaaaaccaatatttaaaaagacattgcaaaaagctttactttttaactagatataaaaataagtcccctcacccaaatggatgaggggatttcattttgacactaccccactcgcggctgttactttcatttctgattaaaatctgttaattatggtgctcttgcgacactatgatttaaggagatttccgtgcaacgtgaagcattattagaccacgtacttatccaattagagcaacatgggcttgccgctacgttgcctgagttattgcagggatttgatattactgaatctgaactccaacctttttggcctgataaagacgcgttaatttttgattgtctgcgccatcatggacagcaaattgatatttggcaacgccaagtgatgttagatgatacgctgaccacagagcaaaaattactagcacgttacgatcagctggctatgcgcttagaaaaaaatcgtttcccaggctgtttgtttgttgctgcttgtagtgcttatcctgatgagcattcacaaatccatcagttaagccagcgccaaaagcaaagctcatttgaatactctagaatgctactacgcaagcttgatcttgaagatagtgagttagttgctaaacaaatggaactcatcttagaaggctgtttaagtcgcttaatggtcaatcgtcgtgctgacgatatcacgacagcaaaactattagctcaagatattcttaaaatcgcccaatgtcgtaaaaatggtgcgctaagctgattgcatatcaatattgcaattagagtaattgctcatttcgttctcttattccattactctcgatgagaggaagagcaaagcggttaagtgataagcaaaggaaaaatatctctttaaaagataaaaatggactatctttactgattgttatttaagcattttttattagaaaatcgcttatgctgaaaaatcagactcaaatagaataaaaagagagcaaacaaacttatttttgcattttttattaaaaagacgttgacgcatcacgctgaatacggtttaatgcgcctcgttgcccggatagctcagtcggtagagcaggggattgaaaatccccgtgtccttggttcgattccgagtccgggcaccatctttcctttcggaaatggtgtaaccgtttccctagcacggtcgctggaagtgagatctccaacgctcggttaaaacttgaatttcagttgtaatcacgttcatgacttctcacgtggttgacaatgatttatcaagtaagggtgttttcctagaacacccttctcaatcaaatccagcttatacacaaagttgataaaatagtcaactttgtgtaaatattttttatttatatcacatcctctgtctttttgatgctagccttgtaagttcaccacctaatcccattgttaaaaactcacctaactcattctccaagatcctgactgtactgtatgcatccagagcaatatattccatagttgaagagagactacggtgtcctaacatctgtttcgtcaattgcatattacgttcaggatgtttcattaatgtcgtcgccagtgtatgtctgaaacgatggggactgacatgaaatccacattcctttgataaacgacggaaaaaagaacgtatcgtctgactgagtggagtttcagagcgggatagtcgtttatgataaagacgatgaacatcaaacaaaatatcgtttttatccgccccgtgacaacgcatttcctcaaccaagggcgccagtaaacaacgtagtggctgaacaaaagcaatctgatattcccggtgatttttactgctttcactgcgcaatgtgatcgtacactcctcaaaatccagatcgccaatatgcaggttaatcagctggttaaaacgaatagccgtcagcctcagcgtttccagcacagcaaaccagaatcgagtgggataaaccgcacatgcctgaaagtgagcctgatcaggtggcagcatattttcctgttgctgaaattgttccagaatacgataaatcgttctcagttgtgattgtgtatagacttttttctgtttttcacccggttcaatttgtgtttctgagaacgggttttctttaagtgaaacaatcccttttttgatccaataattatacagagactgcatatgcctggtttttgtgttccatgtccgttcccggactttctgaatattcagctcatttcttcgccatctcagcacatgctcatgtgtcacttcatccggtagcggtaacgcattttcacaaactccgcaataacgcagaaaaagacgtaccatcttacggtatgttttctccgtatccggccgtaatactttattgtaaaagtaattactcagcatttgctcccatacatccactttctgctgatgttcatcagaactgtgattatctttcataaacacctcctgcttttaacttccgacaatacgaataaacaatgattcctccggcatattcatgccaaaaatctgacgtcctttaatcatgtaaccattgatttttttatgggataacgtaattaatgttttgttatcactcagcggattcagtttttcaccataaattcgagccctgaaatgccctgtttgtcgggtatcatgacgaataatccggtgcaatttaagggattcaaaagaagaaataatatggccgatatcatccggatttttacccgcctcctgtatgtactgataaaaaacagccggactctggcaaaacaaatactccatgacacagtgaaccttcgcatccggcgtatttattgccagttttccgcccaataatccggacttaaaccacgcccagaaagcctctccttcattttttatactcagacagttttcgcgctgttcatccttctcatcacgattgcccgtctgagtatcagataagatttccggcattaaacctgataattcaagtgcatatttcatatcctcagataacggaggagacatatctgagacagttttttcatcagcagaatcaagtgccccatggacaaccgcaccttctgcttctgcaactaccattagcggtatatcgcagtgaattccgttctctgttttttctgaagtaacagactccggaggcaatacagatgttacagacggagtttcaggttgtggcttttgcgccaattcagcaggcgccaatgacgcgatatcattctccggctgccctgatagcactgaagacgaagcatcaggcgctgacatagaaacaacggaagaaaatgccggcaatgcaccggcggggaacgcagccagagcctcattcagcacacgctgtaaatcattatcaccgtttaccggctcggtcaccacgtcagacaacgcctgaagcgcctttggtgtacccgacaaccagtggattaccttctccggtaatagccggaaagccatcatggcccccgtcgtccggcgaaaatgcgtcatatccggcaccggctcatgaaagcgaaaacgatacggtacggtgggcgcactcatccccggctgccacgccgacaggctgttcagttgtccctcaaactgtgccgttaacggtaaccagtaaaacagtccggtataaaaaacacacacattccaggcgctgaactgacggctctgctcttccgacggaagcccgcggggcagcatctctttctgggacatccgcatacaccaggctgtcgtattcagcgttaaatccagcaatcccccttcgccggcatatttcccggtttttgatgccggcacacactgaagtcgttctgccagcatctgcaaaggagacaggcaaagtgcccggtactggttatccggtaacgctaccacccggctgatttgctgtaaccagttttgccgctgcggtgtggtcagcaatacgtcagctgcctgcggtaaataaaagccgtcactgtcacggataaataatggcctttcctgcgtgtttcccggggaaacacgcaatgttttctcttccgctttccgggaaagcgatttacgaaaccacggtaacatcggtgttactgcctctttaattcggtaaaaacaacaacgcaacattaaataaaacataaattattttaatatcaggataagaataaataataaatgcaccttattttcattacgttaactcatccacaaaaataattccggcaacaaaacagaagattacatgaataatgttttattattctgtctctgtctgtttctgctgccaggcacggatggccttttcatacgcgtccgcattcacatgctcccgggtcattccgcattgcagaatattttcccgacctgaccagaagcccgcatttctgtttctttccaccaactgacattccgtcaggtaataacgcccccactcagcctggcgctgttcatcccagaccaggaaaacgcccacaaccagaatcagtggcaacaaaagtccggctgtgacaaaaaaaggaaacagaatttcattccaaaaatcctgagcccactccctcacaccctgcccaaattcacatctcatcacactctcccccatctcattcaatgacggcatcacgataacaatgcgggaataaaacaaaagccgaaattagttttccgaaaaaaataaaaaaacccggtatcactaccgggttttcagtcagttaaatcagtacggaaacctcaccctccgtaatgtggcaatgaatcaagaatatagtccggtcccgtcacatcctggaaaccgtcctcattctcttcatcactgaactcaatctcatcagattcatggtcggttaaccggccatggtcatactcgctgtatccgcagaaaccacagccttcttcggcatagacatgacggacctgacagcggaaacgcgcagacagagcacacaaaaccgctgctgacggcggcccccacggagtatcaaactctgcggataactccgtcgcatacccgccatcaatacagtgaaaaccactgccgttcggccatttcacaccataacggcactgataaaggtgatatgtactgttaccgggggcaaacgcctgccagcgcgcctgccgccagatgacctccggtgttttccataaacagccgttaaaaccgtgtaattcagccgcaaggctggtcggtaacagagtccgcatatccatcggtatggcttctccggtactgcgaaggtactgaatatcctcccaggctgtcgccacccggctctcatcctctccggtaaaccggttaagccagtcaaaactgcttcccgataacaacggggacagtctcgctttctgcgtcgccgtcagcgagtcccaggaatggtacgccccgccttcagataaccacatctgataccactgatggatttgctgacaacatgacggtgtcaaatccggtgcagtcatcagcaggtcaacccagtgcgtgaaagccgtgtttcccggggaaacaggcccggttgcaccgtatgaagtcagttccggtaacggcggaaaagacagcggtctgaccggtttcagtatccccgcgcagccggccagcaacaaatgcagactttgtgctatcgccgtctgccaggcgggtatcccatcatccgcatatatccagtgtttaagagccggcatatccgccgcgttgtgtaaggtgatgtcaagtcggttcgagcaccagtttggcatgatgatgtcctcttttcagaataaaaaagagggcttatcccgtgaggaacaagccctcacgggaaagatgtcagtcgttaatcgttaaggattatccggcatgacatccgggttaatggcaccgctcagctgagcctgtgcaagtaaggcatcgctgtcactgacatacggggatgccggcagataacaggatgcattcagtttatccaggtggtacttatccaccagacggttgaccaccgataccggcgatatcccgagttcaatcatccgggacacctcagcatcatcggacaatccggtatcactcagcgtaatgccgtaatgcacttgcagtaactgatgtaccagtaactgaaagcggataatggtcattttgttcatcgcagtctcctacgcggcctgtcgggatgcggccacattcagtaaaaactcacaggcctggcgggcctgcccggcggcccggaacaacgcttttttgtccgatttcagtacccgcagccagctgtcaagatagctttcatggttcacttctccctcgacgcttaactgcgcacaaagaaaagcgctgcccatttccgcaaccagctcctcaaaactgtacagcgggtcaccaaacttcagggacgatgaggtgatgccttcacgggccagcctggacggatgaccggtactgtgcaccaactcatgcagtaaggtggcctggtaatcggcattccggtcaaactgtgacgacagcggcatcacaatccggtcctgtgacggactgtaatacgcccggttctgcgccgcactggtcaccttcacgccgctggcattcaggatatccagcacccggtgcgtggccggcagggttatccctgctgtctcctctccgggtagtcgccggttttcgtaaaaatgcgccggcaggtcatcacactgggctatgttaaataacggattcgcctttatcatcggcacctccgtcatcaccacctcaccgtgttcatcccgcagcagctcaccgtgacggtcttttgccggcaccttcaccggtttgaatatcacagtattcgtcgccatttcgcctttacggacatggccacccagttgctgtgcctgacggtaagtcagccagatatcgtaaccaaagccctgctccgccgccgacaaccataacagcagcacatttatcccctggtaggaatgaccggtcagggcgttcaccggaaaaccggtgcctgtcccttccgacggccgccatggtcgtttccacggacgggtgcctttttccagcgcggccacaatacggtcagtcacttcctgataaatatcgcgaaccggcttatccgctgccggacggcgtttacggtcagattttttcatcggaataccctcaataaaaaaggtgtatcccgtcctgacggtgagatacaccatcaggtgaaaaaacaatatggttaattttcaaccggcgtttccagtggaaacactgattaaaatgtgttcagtgcttcccggggaaacaccttacctgattaccaccaggccacaaaaaacagtgactctgcgtcaaagtcaaacgtctccgttatctctgacagccagcgtctgacgccttccacatcagcccagtacgcctcatcataagccgttgaaccaaagaaaaagccctcagtggtcgggaaccgtgtctgacagttttccggtgtcagtgcctgcaagtcctgctgtaaagcccgcagatgggcctctgtcaccagcaccttttcacagttctcaaaagccccgatatggtcatgcacccacttaaacagcgcattaaccttacggaaatacccgacttcaatatcgccgtcgctgtccgcttctgcgtaacgtgaggcgggtatccggcttttgtctgtaccacgcttttcactggcataaaagtaaatatcgagtcccttctgctcagcatctctgacacacgataacgcacacgccagcgtgtcccagttgatccccagctccgcatcaaaatgatgtgcaacatgcgttaatgttgcccgtgtctctgccggacaagccgtttcatcaacataggtaacatcatcggggaaccacatctcacacaagacgaatgcctccggattgcagcgggataaatccgctatcagttcccgtatcgtacaggctctggccattatcctgcctccggtaaacctatcccttccggtaacgtcaggataagataaggaaatacctgactgacatagtccagcaccggctgccagtcccggatatccccgtcagaagagaccgaaaaatatcccgggcacaggttgtacaacaacagtaatgccgcgactacaaacacgtcatagggtttgtatgctgtcttgcagaaatcccagtagtcctctacggggatttcgcgctgaacaataaacgtctcatgattcatgtcatcagccgcattaccgttaaaacaaagcgcctcaccgtcgtcggtgaataatgagccatcattcagccgtttttcctccaggccatcacacaacacaataggtttatctgggtatccgccgcaaatctgctctgcggatatgggattggccagatagtggtgatagagcttgtccagatgttcacggaagttctgccacatcagggggtcaacgctttgtttttgtgtaaaataatgtgtatatcccatgtgataaatcctcattctgattaaaaaaatggcggattcatctcctgacggaaatcaatccgccgggcggggtcataacaaaaagtcaatggtgctatcagtacaacaaatcagcgacaccaggcataacgcacctgtgccagctggtatgtcagtgcaaatccggcacgggaggccgcttttatggaacaaaatgtcctgctgtccagcgaggttatcaacgaatgaaagcggtattctttcgaatgcgcgcccagacgtacagtaatgcggatcctgaactgccggggattcactttcaccaccgtcgcacggtaagcgcgccggccggttcggttacttatccacggtaattcaccgggtatccctgacgaaacaaacggtatacggtcataaaaacggtacagccgttgcatgatcagactcagaaatgaaaacggtttgttttctggcagtaaaacagacatgtgtgtttctccggtaaaaaaagacggagaaacgtccacctgacggggagtttccccgtcgggtaggtaagtaaaaaaagaatgaatgccggcaaatcagtcgctcagttcgataccgacaaggtattcatcagccatctccattgccatccattcactgacggtctcatccaagccggcttcacagcctttctgccagatcactgcatcaatccgctgaccgatatccggtaaacagcgaagcagacatgccggccagggtctcatcagaccatccgcacgccacagtaataatctgccgtaagcaaatccggcatcataaagcgtacacttcatcagcgaaatggaatgagggcggttttgctcaccggcatacctttcagccagtttcaaatcagcctcaacatttcgcagtgtccgggcttcctcaaccagccacatcagccattcccaactccgggaatagcgacagacgtgatcggccacaaagaacagtccgcgggtaatgccataaatcatggttatcaaacctgatcagtaaatggaagcagccccatttcagggtagctgactgacacctgtgagtccgttaaatcagtcggttacatgcttttcattttcgtgttgcaggcagcagcggtaaccccagcgccaggcttcattccagatttccggatcgagccgctcagcgatgactgtcagccggtgaagcaaaaatgcgggggcaccggtttgcgagtccatagtaaatcagggcgccaaaacgaaatgccgttgtatacaaatcaagctcaataaacggcagttctctgtaatctccgctctgatacatccgtttttcgtccaaacgtatcacctccagttcttctgcggtgattttcagcatccgggcatcattagcaacggccttcagttgctgagaaacacgggaatgcggaaataaataactggcaataccagacattacgtgggcaacaccataattcaatgtaaaaagagtcataagggctatcctcagataagggaatacagccctcacgggatgttttcccgtatgggtcataaaatcagtgaatgtccgccgttaagcaccaaacatcagcgcttcaaccggatcttcaaactgtgcatttttgatcgcatcgttgtagatacggcgaaagtcagacgcataaggcgtttgctcagccgctttccagacagcgcggaccattttctcaagatgtggacgggtaaaatcagcctccacagataacgcgcccagttgctctgcaacggcactgattatccagaagtttggcggaaaattatcttcgtccgggtgctcgccaatatccagacggacaaaagcaagaaccatgtcgagctcacctgagaggtgatgcagttgcgtgagagagtgcagatcgtcaaaaaaagacgattccggaaatgtagataccttcattgaatttctcctgaaaaaacggagaaattccctgatgacgggtgatttccccgtcagcgggcaggttatatgaagcgttgcgtaaaaataatcctgatgataacgctattctgttatcaccctccgtcgatttcaaggacgaacggagttctgtcatcgcccgtaggctcccgtctcagatgacccgaggattggcagtggcaatcacccgtaggcgttcctctcagattgccggaacattggcattgttgtcacccgtaggcgcttctctcagacaaccgaagcattggcaagttgcattacgcaacgagataagcagattcatttttagccgtttttttatctttgtcaatcctgcccattcaggatttttaccacttctctgatcacccgtactccccctttacgggtaatatgtattccatcatcagttcgtacagtttcattatgaataacagattgccattgcgttcctaatatatgaggctgattaatatccagataatgaatatttaataacatcgcactgtgtttaattatatgccgggtatgtattaaataacgttcatgttccggattttttaaatgtggtggagatatccagacaattgtcgctaacggattttcactttgaatttcagcaatgaattgaaataccagactgtaatatttcagccattcatccgaaccatattgaacaaaatcatttgttccgagactaataatcacattatcaaactcccgcaaatcgaaattattcacgaaagcgatccaatcttttttacttttatttattaaccccgaaccggaaacatattctgtttttattttttcatccaaaacatattttgctgacatttcataaacagccgttaatgaatcacctaaaaataacgtcttcgccattaacggaaaacaaaaagcaaaattaataaacaaaataattaaacagactttcatttttatcttattcctcaatatctcctttctgactataaacccgtttaatataatcgccacgaccgtcaccatgccctaaatccatggaggttaatgcataggcttccttttgactgaatccctgactgagataatatttttcaacatcctgagcataggcataccgtaaaccatgatttgattcttcgtgaataaatccgcctatccgtcgcatcacattaatataacgatctttggcagaatgtaatgacggacgattaattaaataaccgttatgtttatccgcatattcaatggctttattaattaatgttaatacacgggctttatccggcactaatgcttcacggggtctgcctccttttgtcccaaaaaccacatgaacgcgatctttaccgtttttaagcgcctgttgccaggtccgtaatgattttactgactgcacggcttcttcatttctcaatcccagactacgggataactgcatagttaatgccaccccctgatcataaggctcaatccgagcgagcgcttcgtgaaagcgctcgtccgatatcgcggtacgggtgccagccctgctggcacctgaaagccccagcgcctcattactgaggcgctcatgtttagggtcagccagtttatgacgtccggcaacacgaaatatcgcccggatagccgacatttcgttttgacagctgcgtaaactgatattctgttctctgcgggcatggatatacatttcaatatggcgggatttcagttgctcaacagatcgtatctgaatattcaacccggccagctctgccgcaacccgttctgcaattttgacccggtctgcaatggttttaaagctccctccggcctgacgtgcaaggatatgcatttcacgggacagggcttttgctcttctggacattctctgattctccgcctctttcgctctcaactggttaccttttcccggcgcgacggttttatattgcgcatcctgcgacctgacagatacctgagcaccggggcgataaaaggttgagttgttgagaggtatcaaatcagttctctgaactgtttgcggtcatcagaccggcccccgttatcagggcacctccgtccgtcagtttcctgacgtcgccttggtatcgtgtcgttttttctccttttttcataatgttatacgtttttatcatcatataaacgttgagcgttgaaagactttcagccgttctgagcaatgcattacatgtctgtcagattgtcagttttgctgtaagaccagtattgaagcgttctgagcgtatgcacttgcgtgcgtcactttgtcttcgtttcacttgacgaaagtgacgcacgcccatcattctgctgctcaatgtattgctccgaagatgccgctttccaaagctgcgcaatggaaacgcgtcataccgggcatacaaaggttgcagaaagcaggacgtattcgtcagaacacatcagaagaggcagatacacgttatcgcatactctgcttttttgtggatatccgggtgaccggatagctgtgacatggtcactgaagtgcagttaatcctgatgataacgctattctgttatcaccctccgtcgatttcaaggacgaacggagttctgtcatcgcccgtaggccctcgtctcagatgacccgaggattggcagtggcaatcacccgtaggcgttcctctcagattgccggattggcattgttgtcacccgtaggcgcttctctcagacaaccgaagcattggcaatgttgcattaagcaacggtgtaacgtggtaaatttaatcaaactttcttttttcgtcaatacccgataaagaaaaaggagaatattttacatcctcctttttctctttattaaatatccccttgttggttcttcatcgtattaataatcaatgccatctttaatcacgaaaactcaacaatcagatatgtttttatttggatttatcataaacatcccaaacaggcggtttatttttcatagagtcaacagaaacacgtaagaagggcatattagttttaaatgttaaaataaaatccaaggacattctattacaaacagaaaaaaaacgtttttgttcttcatcagtaaaatttttttgttttgggaatataaataaactccctaaactaacctgacaatgtatataacatttctcaccaaaccagctcactaacttatcatgatatttttttcagtaatcgtagtcaaatattcttttctgtaaaatttaatacctctctcgatcattaaccaaaagaaactttctttattctcagaataaaaattattacaatccccattaccttccaaagcatcattgtcattttttttattatataaacatcctttgttaccatttaatgttgtttttctccttgagtattgcttccttattttactgaaccaccccctcctcctccacaaatatcccgcccctattaagaccacaaaccaaaaaataaaattcatattatcatctcctatatacaaggactcggatacatattaaaaacttacttaaactgacataaaaaatcaaattcaataaatccatccagatgaaagaataagatttttatatgaaggcaacaaaaaagttatacacatacccaccgccaccatcagggccgatgccctgtacgctcccgtttacccgattgcttgttggcatcgggttgcactggcttggtgaccgtggatatgtgcataactcacaagatgtagacaatgattaaaaatcgacctaaaattgtattaacgatagacgacaagcatgagataaatcagactcactgattaccggagggggaaatgagtgataaaacagccgcttccagaggagaacgctggggcataaaagcagcttataaagcaaaatggctaatcaaaaaattgaaggctttcgataagaactgtgtggcaagcgccaaaagcaaaaatatgccgggttggctggggcatattccactggtatctataactctcgcagtcatcgcgttactggcttatttcagtttgtacatcctatttacctttggagcgttggtgattttattttctgtaatagaacacattgatatttcttcaggaaataacattcaatccactgataacaataatgaatggcaatccaatctcgttggcaatagtgacgactttagaaatggcaaccaaggttttggatattatatgaacggaataaatattgacgaagattagccagccacaaaactaaattttgcagctggcttcaaaatattattagttaacttttttagaaatagcttgttctgctaactgtcctcctttcccccccgcactatgcgcaggtgaagtcgcgttagatgtcatattacctagctcggacccaactttagctccagcccaaccaaatgctgtcaaccacaacgccggcaacaccaaaaacatcgttcccattaccaggttcataatgacatcatcagacgtgttctgaagcccgttcatattccactgactgtgcgtatcggaattatacagtgcctccatcatccagctgtctatccagcgtgccagctcccaccagaatgtcagaaagttcagcgcaaatatcacaaacgtcaccgttatcgccgtcttaaattcatacgccgaaaacatcagcaccatcgggatcatgatatacaccgccattaacatcagcccctgcaccatcggtaaggactgtcgcatcgtatcaaaggcagggaatgcccccagtgacgccagcgaagtcccggctacccctcccattctggccagctcattcatcaccgtcatatccgcattacccccgtatccccggtatacccggccgccggagacatccagattcgccggactcaccagccggcggacgatggcctcctcaaactctttcgagtttttattaatcagcttcatcgccgcccgggcacgcagccacatcccttcatcggtctgctctttgacaagtttcagtaaccctgcattcgcatcattccaccactgataacaggtcgggtaaccgttgccgttgacattcgcatacccgtcatcccggtcggcatcccagggaaagcccgcccgcggtgtccgtgactggatctgatgatattcccctttcataaaggtggccgagcctatccaggtgatatcctgtaacgttttttcatcctgtgtttttccctgatctttcgctttccagtcatacagggcacgtgagtaacagtcatccgtaaaatcctgaagtgcggcagccagcgccggatttttaatgttgctgtgctgcacctcaaaacgcacctgacgcaaatccggccggcacggaatgctggccaccgccgcctgagtcacccctttcgacagcttatgtaccagcatccaccacagcgggattttggctgtctgattatccagtgacgacaccacgccgctgtaaccggattccgccggcttcaccggggtccaggtgccgcaggttttggtccggctggtatcaaattgcagggtactgacactcacctccatcaacggcacacaacaaaacaggatcaccacaaaggcgccgtaaagcgcgttctcgatacgcacaattgccagtgaacctttgttaccctcatcctccccctcttcccgcactttcagccagatccccagcactttaaagaccagcggcagcgcaaacagcccggtgctggtcagtaccgaccacaatccgttattcaccacccaggccagcagcgtgagaaaatactcgagataactgtttgtcatcataagccgtcacctcccgcccagactgaccattcactcaccgccacaaaggcggccatcgccagcccgctgcgcttcagactgcgccgggccgtctcactgactttcgggtggtgatacagtttccataatccaaccgccacggctccgtacaacacacaccgccagaccagccagaaccagcgggcacggtaaaacgcccggcgcagactgtccgcctcaccgtaataactcagccccagctgagccaccgccagcaacaccaccatactgagcagggtcagcccggttactttcagcaccggccataaccggcgcccggtttttcctttcgtcatttaacgtcctccggtgtcactgttttgctccagtccctgtacacgcacatccgtattatctggggtctgggtggcagggttcgcctgtgtccgttgctgatcacgctcaatcaccgtcagcatcgcgttattggcaatggatttacgcacttccatttccgtttgcagcatcccgatttcgcgatccagctggtcaaccgactggttaccgatctcctgggctttcggaaaattaccggcattcggctccccctggccggtgatcagcatccggcgcatcgtcagcgccagctccatcgtgtccgccatcgccagctcaccggccagacgctgtgttaatgccgttttatccggatcccggcgcagcgcttcaatcaccccccgggagaccgtcaggctgccggttttcagtttcgccaactctgccgccccgaccgcgccccggctgttcaccagtttatgcagctgttccaaattttcccgggtggtggtctccagcaccggtgccagcccggttcctggctgggaactgcccggttgctccgcctcaccgccgctctgacaatccgccggattggtgcaggtgcggaccgatttgctgcccagcacctgtgtgaccacctgagcggcttcctcactgttggcaaagcgcctgcaagcggctccgttacactggccggccggcaccggggccgtactggttgccggcagaccgttcatgatattaaagccggcctgtgcaaaatcctgcgccggctgaatcgcaggctgaccaaccccaccgcgctgtttcccgcctatccatacaacccctttatcgccactgctttgctgaatttgctggtcagtttttaccgcatccccgtcactgttattgatgatattctttgcttcttcgaggatcgccgcctgcgtccactgattattttctgaaaagtccatcatccgtttagccatgttctgacagttcagctgcgccttatcaaacgccacattagcctgcaacaccccgttggtcagcatttcatacaggccgggattcgcccgctggatagccatcgccggcagactggccaccgccccggtggcattctggatcacctcactcatcagattcttaaagccggccgtcaccccgttcagctggttgcccaccgtggttttgatatcaaaattgccgcacatcagatcactgttccagcccatgctcatccccagacgttgcagattactgcgccccggcggctgggataacaccgtgccgccgcccaggttgtagtacagtttgtcggagaccgcgccggaaacatttgcgccgtagccgatatcattcgcaccggcagaaaaatccagcccggcccggacagaaaatgccggtacactgcataacaccatcagtgtcagcgccggcggaaaaaacgtgtgtcgttttgctttcatcatcttaaaatccctgcttaaaacgttgtgctgtacagaaatttttgccccatgcgcttgcagcagctgtacggctgccacaatgcccaggcataattaccgtcctgtgcctgtgctccgccctcatccggaaacaccgcacagctgtttttcagccccggcgacaggcgctgccatttatggttttttgtcccggtattctccgtcaccgcgtccggcggccaatagccatcccggcggttgcctttcaggggcacataggtatgcgcctgcccggtgcgggtcataatatctgccacgcgctgcgccaccacagccgccgctttatccccgtcctgctggttgacaaaaccgctgcgcggatagagatttccccacatgttgccccggctctgccccccgatttcccgtttcccgggaattatcgcttccggatacgccatttccggcacaccgagccgccacggcacactgtcgagcgtgctcaggtaataaggaaacagcggtgtggctgcgctgtcacaggaataccccggaatactgccgccgataagggtggttgccggatgaccgatagcatccgcataaaaaaagtgcagggcggttttacgttttgcctcaaacttctgttcactgtttccgcccccggcagataccccgctcagcacgccggtcacggcattttcaatcccgccggccgccccgctgaccagtgacatttcccgccacgggttttcacccggggcatggtaggccgagaccaccgcctgcggaataaaatgtgacacccggacagatgtccggatacggcagccgccccagccacacttcagccagtagcaaatcccgctgatacgccagctgatacacgacggtgaggccgcagaagcgaccagagtggcggtactcagactggcttccgccaccggcaccagtgaacaaccgagtaacaaagcccccgccagacgccggcgatgtgattgtcgggtcatggttgacctcctccttcctgttgttcccggtactgctgtatctgcgtcaccgcctgtgcaatatcggtggtgccgtaaaccacccactgcgcatcaacgacgaccgccggcagagatgacacccccagctgccaggcctgaaccacgccctgataagcctgccgtaatgccgtttctctggcctgccaggccggactttgtaacagggcggtgatgtgcggggcatccgcttcactcagttccgtccccggctgaagcagggcctcatccagcaggcgttcaggcgcatccagatacaccacctcaaacgggatgtccgtctgcggcagagcgtcatcctgcgtggtatacagcaccactgccgccccggcggtcaacggcaggcatgacagcgacagcatcagcaatccggaaagagataaaaatcgttttttcattcggtcagtcctcacaaacgaacggtgagagaagaaaagcgcatcaaaacccgccggtgaccggcgggttttcaccggttaccagcccaccgcaaacccggcgccgatactggtatcgccgccgttattccatgacgcattcaggcgcacattggtattggccgtcggcttatactgcaccccggtggctatcgcctgtgcatcacggtaatgccccatcgccatcccgaacgaaaaacgctcactgttcacatacggaatggaagatattgcggtcaccccggcaatccccgcattggcccgtttctccacctgactgattttattgtccagctgactgaaacgctggtcggtatactgccgggcattgtccagcaccgtgtgggtcacctgcccgaacgtctcatcggtatagcggtttgcggccgccagggtctgttcctccccctcaatacgggcctgctgctcttccgtaatccgcttgtttatcttcgcctcactgtactgaatgctcacatcggtgtagtccatggcctgtttcagcgtctgcttatcgccggcaatacgcgcatcccgctcctcatccagttgccctttgttgaccgcatccgtttttgcaatgccggccgccacatgcgtcagaaaacgttcctgaccttcacggccgacggacacgctgttatcccggtcagccaggctgccgtcccccagtgccacactgtttttcgccagcgcccgggcatccacacccagtgccacggatttttcgcccagcgccagactcttatccccgaccgcaacagcctgtttaccctgactcagcgtactctgcgcctcattcagggctttatccgccgcctgatattccgcctgtttctgcgccagttcggctttcaccttctccagatcccggatgttttccagctcggattgcgtcggacgcaaatcagacaactttgtatccagcgcggagagatccttttccagccgggagagttgcgtttctgcctgcttcagtgcctgatcggtgacggctttttccgccgataactgctgtttcagctgtgtggcctgtgacgacatggcctgtgtgtgactgagcgcattgtcctgaaggtactgatccactttttgtttcagcgcctccgggttggtattcagcccgacggtgttatcccggggacggctttccagtaccagcagttgctgtaactctttggcataatccgggctgtccggcgataaactgttgaccttatccagctggatcaggtagttcagctgattctcatagcgggtgaaaataccgctgaccatctgattaaaggtgccttcatcgatgttatccagatacagctctgacaggatctgcttcccggcctctgtcaccccggtgagcccctgctcaatttgctgccaggcatttttctgataagcctgatacagattctttttcccgtccgcagaggtgatcagggcgattttggccagctcttcctgataaccggcaacgcccttcagggccgcggtattcaggtgtaaacgggataattgtttcttctgctcgctgtccgtgaccgcatccgaccacagcatcgctttatcactgtggccggcactcagtaccggggacagggccacaccctgatagttggtcgtaatctgagaaccggttttctctttgatggtttcattaaccagagcacttctggttttcgcttcaatataggcattaacataactgacataaaactgcgtgtcattactgaccgacgtatcctgctcaacccgttttttcacttcctgagccagacggtcagcctgcccctgctgccacaacgccacaaaattctcatccacaatctgtgaaaccgcccccagattgcgttcataaatctgtgccatccggtcagcgacctgctgtgcctgtgtcacctgctgctgttgcgcggtacgctgacccgccagggtctcctgttgctgcaacaacggtttcatcgcttcctgacgctccagaatattgctgttcgccagcgatttactgtcaaacagggcctgcgtctgcatgtactgctcatgcgcctgcgccctgttctgcaacagggcattctgggctttcatcgccgcctgcgcctgttccgccgtcatattgttccccagcgccatactgccctcaccgacagccgtactgtgctgccccgtggccacggccgtgtcccccagtgacacgtttttggcctgtaaagcgcaggaataactgacaaccagcgacaaaagcgttactttaactcccgtcgttttcatgacgtcatgtttcctctttttaacatacccaatgaagcggccgggtaagccgtgctgcaacacggtttacccactccctgctccacccgtttcatcatcccggcacccggggcggtaacccccgtttccggtcaagttcatctgccaccctgaacgccgcttccagctcactgcatccgtattgctccatcagcacccgccgttgctgcttctcctctttttccgtcatccccagcgccagatataagctcggctgtaccacccggaacagcgcctccactttccgcgccagcaccaccccttccgtgtaacagccggagagtttggctgcggacagcagcacctgtttctgctcctcactgagcgtcttaaagcgggcgattgcctccacctctttctgcggcatcgtcagacacacccaccactccgccatattgagcattttctcggcacagtccggatagtcatcgaggttctgggtcgccagccacagccaggcccccagtttccgccacattttcaccactttggtcacatagggggataacagcgggttgaccgtcacgatatgcgcctcatccaccacaaaattaatgtcccgggcccggtactgatcccgctcggcaatattgttgatggagttgataagactcaccatcgtcagcgccatctgggcctcatacccttcccgcgccaggtgccccaaatcaatcagggtcacatccgcctccggccacagctcccccggcagattaaacagctcatgctcaaaactgcccggttcggtaaacatccccagggattccgccatttcggccgctttcgcccggcgctgcggatttaatgcccgcccttcctcttcaccttccccccgggagagggcatacagcgcctcctgcaaatccgccggcagcatctgccggtcggcggcataagacgcccgggcccccgccatcagcgcccggcggatcatcgcccggtcagcccgcttcagctccgcttcttcccgcacatccccgccggtgatcatcatgcgggcggagatttccatttcccccagaatgtcacgctgcccgtcatcatcctcagattcactgtccgtctctggcagttcatccgcattcagtgccagacgctgttcatccatcatcagcagctgatgcgcatccgcaaacagcggcagacgcaccccgctgccgggcttgacactgaccttattgacactcagccccagactggcgtaatagtccgccagtaaaccaaaggagttaccggcctccgcaataaacagacgcggacggcggaccgccatcagctgcgataactgtgcgcataaggtggcggatttaccggccccggtgggaccgaataacagcagatgcgcattctgggtacgatcctgtttattctgcggatcaaaggtcagcaccccgccgccccggttaaagaaactccagccgggatgcccggtgccgctggtgcgcccggtcaccggcagtaatccggccaggtgctgtacccaggtcagccgggtataccagtgttttttatccgtctgcgggtcaaaacacatcggcagggcacgcagatacccgttcagcggcgccacatcatattccggcttcaccggctccagaccggcattcagcagcgtggccgtcagatccacgcgctttttgttcagttcctccaccgagccggcacgcagcagcaatgacagggaggcccggtaaagcttatggcggtgccccagtaaacctctggcggtttccacgtcccggcgggtacgttgcgagtcggtgttttcccccaccgagtttttccccagccgggtaaattcctgctccagcgtatcctgaggctgtgtgacgatggtcatcgacagcatcgtcccttccggaaacaggtccatcagcgcattgatatttttgtcaccgcgcttctgctccccggtcaggtgccccggccccggggctttacgcagtttttcgatattcaccacaccgtgcgccaggttatcaaaccaccacacgccgttttccacatccgaccggggcggggtaaaccacagcgtttccgcaaaatccttcagcaccggcagggtgcccggggcttcctccgccgccggccagtacgccccttcccggtacagcgtctcccggtccacccagtcaggggccggattgaaatgacgcagcagccactgatgcacctgcctcccgtcctggcggacacactgcacgccggcactgcccagactgctgaccagccggtcacacatctgattgagcatcgccaccggcggcatcggatcggtatagctgttccccagccggcggtaaaccaccatccgggtccggcgctgctgtccgcgccagggttgtccggtcacctccgtgtccttaaacagcccttccggacgggcaatcccccgtaaatgacgcgccatttcggtcagccaggcttcggtaaacgcggtgccccgggccgccggcaggatatagtcccgcaatgtggccagtgtgacgctcacgtcgtcctcatcctgacaaaaaaactgcaccacccacgggttatcatcatgctcatccagactgtcctgaagcgcatcctccaccgcatcccggatttcgagcagacggccggcagagcgcccttccgtcggcgccggctcaacggcatacaccgccccgaccgacaccccgtcatcaagcagcaggcattgctcctcatccagaaattccacccagggcaggtaatcaataaaggacggattcgcatggtaaatcttctgctcatccgcccgggtcatttttcccggccgggaaagcggctgacggcctaaaccggcattctctgccggtgtactgcggtgtacggttttgtcagccttgttttcatccgttttttcagcagaaaccgcctgcgctttccggcgtgagcggaataatgaaaatcccatcacaagccctccacacgctcacccggcagggcatactgcacttgatggtaaaacggaaacaccgtactgtatcccggcaccggcagattgccggccgagagatgcgggaacacatacatcaccatgtccgggttcggcagacgcggaaactgctgatggatctcactgctttgtgtccgggtatacgcggtgtccgcctgctgaaggcgcgcggcttcatcattcgtcagggcgcgtcgcagggcgctgcgggcggtctccgtcaccgtccggctgtccgccgcaccgttcggatcagcctgtctgccggaccagatggccatcatgtcgctgtttcccgccggcagcagctcctctttggaggtggcacagccggccagcaacaacaccagtgcgcacagcactctgcttttcatcacacatttcatcattctcatgatatgacgcctcccgcgcccttcaggatcgccccccggcaggtcagccgggcaaactcaccgtgacagctcagttcagatagtgaaaaaggcacacattgccagccggctttatccggcgcctcccctttaaaaacggtgtacagcaggcgatcccagtcactgtcctgcggccacgcctcatcccgcggggcaaaccggtaaacggtaatgtcgttgtcactcagccccacccggtgacggcccacagacagaaccgccccgggcgtctcaccggcggtactctgccacgccagctgtatcgtcgccggtgacatgccggcaatcagctgctgttgctcctcatcaaacacctgatgaccggccaccgtcaggcaaaaatgacttccagtacaaccggcctgtccggcactgaacacaaacaccagcggaaacgtcaccggcgtcacagccagcacccccggcttcgcaaaatacgtcactccagacctccttcctcaccctctgtcagtgaaaaaccgtaattcacccggcgtccctgcgattcataatccaccgggatctgacggctgatatgcaccgcgactttctgccccggcggcacatacaccgcatcaaaggtctgcccgtagcgggatttcacccagtccgccacatccttaaacccgccgccgatggcactgcccagcgccgctttccccgcatccccggagagcgaggaggtgataccgtacccgttgttctgcgcggtatactgactctgcgacatcgcatccccggccgaggccgctgccgtcagggcaaacagggtcggcagataggtgccggcattggttttacgttcaccgctgatacacgggatcccgctctcatctgaaatccagccgagcgacccgccgttattacgggcattctgtccgctgttggcctgactgccgccgtccgtccggtcagccggcttcggcaccgtgcggatcgtgccgtccgtaaaaacaaaggtgatcgaggtgatatccccgcgcacacaggacaatgtccagtcaccggtggccgagccgctgatcaccgccccttccacatccggtaactcaatgccgttcgccgtgaggttgtcttttcccaccaccaccttgaacggatacggatcggtcactttaccgtcaatgggcacccgccccagcaacgccgtcatcgcctggctgcccaccagggtggcattctccggtatcgtgtacgccggttcggtatgggcctcaccgtccactgtaccggagagcgtgcgctgatttttggccacccggtccagttccgctttctgacgggtaatggcgttatcctccagaaaagaggtcggaaacgccggtttagccggttgtccgttcaccatccgccccggttcagccggttgtgcatcctgcggctcagcccacagcaacccgtctttcaccgtcagtccgctgcccccggtatccagccccagtcccagcggaatatcgccttgtccgctgccctgagccggctgaccacctgatgctgtcagcgtttcccccaggctatccagacgccgcatcagtgtctgctgctcctgttgcagggcacgctgctgactctccgcttcctgacggacggaagccaccgcagactggatctgccccgacacattctgctgccggttacgcagctgcgcattctcttccagcaatttctcattctgggcgatcaattccgcctgacggtcacgtaccgttttcatagtgccaatcagcgtcctcagtgtatcggccggggtatccccctcaatcccgagtgacttcagctcccctgggtcaaggtcattgattgactgagacaggttgtcctgtccgctgccggtgaccggcgtgtcgggctggcagcttttgataccaatcagcaccgccaacgccagtgcggacggcaccagaattttgaccagcgtattggatttcactttcatcgggctttccctcccgtcctcctgacaggcggctccgcaggaaacgccttatccggtttgcctttcatcaccagatacactgtggtggtatcctccggtgtgcccttcgcgtccagccactgatgctggaacgtggcgctgacaaactgcccctgcaactgacggggatccagcacgactttctgagcggactgattggtcagtttcaccgccaccacccggtactccgccgcctgccagccggccagcggccgcgcgatcagtggttcagacgggtagagtgctgtcagtgtttttggtaaggtcagtggcaaaggttgtacgccggacaccggctccactgttcttaacggtgcatacagactctgggcggcataacgggtcagtaagaccggtaacggcgccggataacgggttttcgctttgcggtccacgctttccggtacggcatcggctgctgcccccgcagcctgcccgctgcgtctgacgctctgactgtcacgctgcgtactgacttcaccgctgtacaccacccgcaccggctccagcttccctttaccggcagtggccgtcacatccagcaacaggatttccccgctttccacatcctgtaactgaaggcgggtctgcgggaaggcgctttccgcccgcaggtacaccgcccctccggtactctggatccgcagtttctcattcagagacggtggaaaaccgacacgcacatttttttccacaaacacaatgcgctcttcccccacatgcagagaaaccggtaacggaatacgctcccagcggaccagctctaccgcctgcaccggcagcggcagagcggccacagaaaacaccgccgaaatccccagagcacaggccgtcagatgacgttttatgctcattgactgacctccttattctgctccgccgcttccagacgctgaggcagcccgtcatagcagtccagggccagaccaaacggattactttccggatcgccctcccagcgcaccactttcaccggataacgtaccgtcgctcgcttgaccggctccgcgctaaaatattcatccgctaccaaatccaggcgcacgatccagttatcccggtcaatcacccggactttatcctcactgaacccgcgtcccgggatctcatacaccacccgggaacgccctttcagctccccgagcgtagtacggtaagcggcctctttctcaaaatacgcccggcaggacggcgtcagataggcactgagctgtgcaatctttcgcggataatccacctcgccgtctttcggccaggcattcagttgctgaaaaatataaaagctgaaagcgtacaccgtcggcagcggcacttcccaccatgcccgggtactgccggagcgcaaatccggcggattatggatcgtcagtttagccggcgcccgcatccagccggcaaaggccacaaacaggcagagcaccagcaccccgcagatcatccgcagtgtcagaatgtgctggtcccggttttgcagggcatgacgaaatttactcatggcggcctccggcgatataccggcacagtgacagcgcctgcgtccggcgtaaaaaccagccctgagatacggtgatgagggatttttcagtcagccgtccggtcagcggcaatgtgcgggcaaacccggtttgcagtttccaggacaatcggcggtagagataattttccggttttccgcgtttgatacgggtcagaaaagtgccgccaaaaaacaccaccaacagcggcattatcaacgcgccggtcggcaggatcacccacccggccagcggtaacagcgggatactgataacgctcccgcccacacaaccgacaccggcggcggcaaacatttcatgggtggtaaatccgcgaaagacggtgggctctgcatttaagcgatccggcataaaatcgatggtctgcatcgttgcctccgcttaaaaaataatagtggcggattttccggccagccagacgaccgccacaatcaggacgacaccgactacaataattgtaccgaatttaccccagccagccttttggtcgcgcacttcattgaacgtggtgaccgcggcaatggccaccacgataaaagccgtcgcagccacaaccagcccgccaatcacaatgccgtcattaagatagcctttaatggtgtccatcagtccgccgccgccaccggaagaagggggttccaccgaaggcagtgcggcatacgccggcatcagactgaataaagtgaataacgtcaccactgacgcaccaatacgacggacaccacgtccccaaaatgatttcatatccataaaatgacctttcattctgtaaaataaattaaacagcacactcaactggcaaacatccagatgcagaccaccagtaatatcactgcccggacagcaaactgccccacccttgcagtacgaacattttcatttgcccagccccggtaaacatcaaccagtccccaggctgcccataaaaacagcaccgccagtaatgccccgatacacaacagattcagaacagccggagacatccccgagccggcagcagcctcaaatgccgcctgctgtgacggattcatcgctgctcccggcggtaatccccgcgcagcggctccgccacattaaccggcaccgtgggctgggcccgggaaggctccagatagcggacaatcccctgccggataatctccacctctctggaggcgcgggaataatcaaaataaaaacgggcgtgattgtcctgatttgcctgaatacgggcgcgctccaggctggcctggatgtgatcgagctgctttaacgtcagcgccagttcatctttttcagcggcctgagcaggcaataccccaaatgcactgacaaccaacgcaaacagggaaataagcggagaaaataatcgcataacgactccttaaagacggttaacgtggagtcagggtaaaaaaggcggacagaaaaaacagcaaacaattagttttccaaattttttaattttatattgcttgctttttgcgaaaatagctgaaatgaataaataaaagtgagcctatgagtcagaccatcacccgaaaaactgggcattttgcctggtgtgcactggttgccctgcatctggcccgcagggaggggctggtgcagtccgacatgcagaaaaacctgtttttaatacgctggctggcaaccgccaaaaagcaacgccgttttgaccgtgacgttacgccggatattgactggctgcttcaacagggacgtacactggggagccgggccaaactgccacaaaaactggattatctgtaccgctcctgtacaggcgcattacacgagcagagcgatctgttccggctcacttatgcgcttgaatcggccaaggaggcaggctttgcctatcagttattgagtgataaatcgtggcacagacgacatgcggtgagcccggatacgctcagcaacaccatctgtttatccaaaaatgcactggagcaggcttttgatactgacggtcatcagaccgcacacctacctgtaaaaatcggaggtgatatcgccgcactagctgaactgctgacacaatgtggctggcaactcatcacgacagacaacccgccactttatttactgctcacactcatcaatccatcaatcagcgcaggataaccccatcacaccactgacgcgcggcctagccgcttgtctgctgacagagacacacaaaaacaagtgttgtgtgtctctgcccagcgcctataaatattttttaaatgacgcggtagccactgccaccgcaagcccgaacaacagagccgccggtaacaacaccagattagggtaaatggcagacggccaggacagataaatcatgcacggaacaaaaaaggccggcttaacaaaacgcttggcgtggtgatacacaaaactggattcatacccggcaccataacgccgcaaatcacgccggttaaagccttccaccatgcccaccaacagcaccataacaaacaggggcatcgacagcaccagaatagtcacccggataaaaaaggtcagcgtcacataaaccgtcgccagcagatagtctctcagctcggacacaaaccaaatccgccagtcatccagttcacgggcaactgcattcccgctgacaggatacacgttctgccagctctccatcagcccggactccacaaacagccaccggtatgcctgttcaacggtatgagccagccactgcgccggactggacatcagcagactacgggtaaacccttctgacagatacccgctctcggttaacatcacctgccggctgtgctccgccccttcgtccgcccagaaaaacgcaatcccgacccactcaatcaacagactgcatacccaggaggccagtaataccccgatgatggcccacggccagtgccacaacaatttagccggcaaaccggggtcttttgccgggtgacgcggggtttcctgacgtacctcagcagttgccatcgttgcccccttcggtatccggtgccatctcagccacattcataccgccgctgtcatgccgcgcatccgaaaatgatgacgcagtccaccaagtttcgccggtacggtaatttttctccatatactgtgcgattttttgtaaatccggtggcatcagggcatcagcctctgccgccggcaggggcatcctgattttccataacttcccgccttccagcagcgcaaacgcctgtcctttcggtaactgaataatatctgccggtaacagcagcggtttagccaccatactgaccctgtcctgggtattggaggtaaaatcactcccctgcctcggattggaaatatcggtgatcccggataccagggttttggtgtaaatatccacttccggtaactgttccgtcagtaatttcgcggtcatcagttcacggacacgcaacatcaccagcgtattaaagttaccggtgacctgcgccgatttcgccgcattccccagccgggcttcaatatcagaccaggtctgtgtgtaggccgtcacttcaatccccgcgccgccgctcttgttcagtaacggaataaattcatcccccatcagttcattaaattcatcgcaatgcaggctgatcggtaattttccggcgtgctcatcctccggcagtccatcctgagtcccgaatttataaatatgcccggctaccgagaccaaatccgcaaacatggaattccccaccgctgccgccacttccgcatccgataacgcatccagcccgacatatacaatcccttttttccgaatcacctgctgccagtcaaaaatcggacggggatcctgcatattggtgtaatccggcgacaacagggcggcagtttttccggtagtcagtttttccagtaacggcagcagagaagccactattttatcaaaataggtccggtcataacggatcgcactgcgcagcccgtccaaaatcggatcatagatttttttccctttctcactacttaacgccagctccgttgcccagatagccacagctttcggatcactttgcagatgacggggcacatcctcgaccgtcagcgcgttctgcgcattctcgatttgggcaaacaaatcaggtagttgtgctttaatcacctgcatcgaatatgtctgatagagttccccgatattggtgacataacgtaaaattttggcataatccggacgctcccccagagcaaccagtgcccgggcaatgatattaacaaaccgccaggcaaactcccggaacgccgcgctgttcccttccccggataactggccggcaacccgccccgcgacttccgatactcggccaaaacgcccgatggcgttataacgggcactgatatcaggccagcccaagtgaaaaacataaaactcctcactgcgccccgcacgatgcgcttccgcccacatccggcgcaataaatccgcatcccctttcggatcaaaaacaatcgtgatattcccccggcggatatcctgagtgatcagcacttccgccagacgggttttgccgacacgggtggtccccagtaccagcatatgaccaacccgttcacgcaaatccatggtcacattcacctcatccggctccacaccgtgtaacaccggattcccccccaccggcgtcagcgggcggaccggattcagccaactgtctttttgcaaaagccggcaaaccgccggaaaacgggattcaaaacggagttcaaactgccgggccagccggtaatgtgccggcggctgaacataccgctccacttccggacgctgggtttccagcaggcgttgcgtgtgtttttgctgccactgaaacccttttcccagaaacagacgctgccggctgaccggcacctgtgccgacgtcacctgatagcggggcagacgccggagattccggcggtaacgtaatacccggaatccctgatgtgcccgcaatgcggaaaaaccggcaaacgcaccggcggtgacataactcacggacggagacaatgccactgcccagggcgctaccgcacacacaaacgccgccccgccggacaccagagcactgttcaattccacggccggtcgcagccaggcctctatcacataacgatcactcattctctcaaactcttttttggtgttaccccggaaaacagtgtttaaaaattcaccggtgtttccagtggaaacagtgttcaaaaatcatccagcgtttccactggaaacactgtttgaaaattcaccgacacgtccggaaaacaatgtgctcactgcactcaaccccagggaggatctgacggattttctttttccggtacacgcgattctttcccgtgacagtgacgatgacggcgggcaggacggttttttttccccaggagtctcatcacaacaaagaacacgcaccacatcagcacggccaaccagaatgccggggagtcaaccccatctgaaggccatatcggcggtaacattacttcacctgctgggtcaacccggtttccgtgatcagaactgggtaatgtgataactgaagacggtgagctaaatcggtgccagaagctggggagagcagtcctccctgagccagcgcctgaagcgcctgtaacccggtttccgatttcacattcaccaccatcccggccgcattcattgcattcagctgggctgcgtgctgtgtgagccatgcccgggataacggatcatcccccaccagatacagtgccccaatccccggtaaatgcaggacgcggtcatccacctcccccggcgtcatttccggtgtctcaaccggcaacaccattgacggggccatcacggacggcagagggcgggacgccggctttgctgtccattcattcggggcattatttatcgcgtcataaaaaggtgctgccggttgcccgccataatccgccaccaccgttaatgccgcctgactgccgccggctgcgcaaaacagcagcatccccaagacgggcaggggataaaaggctcgcgttgtcttttcttcaggattatttcgcatcggttttgttctccggttctatccacacaaacgatacagcccgatctgtactgactgccggtaaatgagcgggaacgggttgtgtaccgcccgtcagtgtcgccagctgacgccggacactatttttatagcgtactgcgggctgaccgcccgccggatggtgataacagccggcggcacggatccaactacccggtgacgcctcataacagcggcgcaggatgcgggcggccacatgcaaattggtataaggatcaaaggcctcccaggcggaacggaagtgatgcccgttccagccccagttcacctgtgcaatccccacatcaatacgtctgggggatgtcgtctgtaaaaacgactgtaaagcctgccaggcggcctgccgtgtcggataacggtatcctttaccagccacattcagcgtccacggccagggatggatttcaccggcctgcgggtgatgtgccggtaatgtccaggatgactccgtcagtgccagggaatacagggcttctgctggtacattctcctgccgggccacctcacggtagcccggcggcacctcccgagccggtaacggcacggaaaacagcagcaggacaagagtgagcagggaatttttacgcatcacgcctccggattaaggtgtgagcggacgccaccgcccatccggtaactgttgcatcaccaccggtgtggtggtcagtccgtactgaagcgagagaccgccatcatgatttaacgtaatttcccgctttctgacgcgctctgccgggatatttttttgtctggcccaagccctcaggcggttatcatccccctttgtccccagcacataaatatcaaacggctgtttgccggccagcagagtagccagacgggcatcacacgcgctacaattttccgcctgcacaaacagtgcctgccggcgctgcgctgttccctgttccatcctgccgaatgttcccagactgaccggtaatacctgaccatagagccgcttccaggcagcatctacttcccgctgaaacgccagctctttttctgccctggcaaattcctgctgtacccacttttcagccagccggcggcgctcttcgtctgaccgggcctcaatacccaatgtcgtcaggggatccagtccgggagactgaataccgcgccgccctttcatcagcgcctcaaaacgggcatactcctccgcactcagtccccattcctgcgcctcatactgcaatgactgtgtctgactctcagccgatttccccgcctcaatctgaaccggtcgggttgccccggaaacagactgtgcagctgtcagcggtgcggacatcagacacccacccagtaaaaccacgcatcttatgtttttcatcacggcattccttttatggcaggcgcaacgtcactgtgcgcccctgataacgtaatgtcacacgatcagtctgaatgtcggtcatttcccagccctgataacgtccgcctaccggcagtaactgtacctgccccagctgacgaatatccgcaggagccagtgcggcaagaagacgaccgccccgctgttcaatcgcggttaactgaaacggcacggtccgggatggacggacagaagccccgagacgggaagtttccggcgtggcgggttttgccctgacaaccgggggattgaccgttttttgttccggctgacgctgttcctgcaactgatgtaacgccagtgcccactgtgcctggcgggtttccagttgtgccagccgtttttccagcccgtcagacagtacggcgatctgttcatccggtttgccggccaccgccagctgtgctgtcaccgttctgagggtgtcgcgctgtgatgccacatcctgttttagcgtcgtcagcccctgacggagcacgtccagttgcgcattcatccggtcatccgtgacagagtcagccatcttcatctcaatcgcctgtaatcgttgtccgagttgtgacagagcctctgagtgtgaactgataacattactgtggataaacagcgggataccggccaccagagcacaggcgaccacgcccgtcacaatcaccccccggtaaatttttttatgtaatggggttacggacaattcttcagaatgagtcatttcagccaccctccgcgatgaaccttattcacatcggtatgaccagtggaagtgttaagcaccggtggcaccggtaatggcgtactgcccgcagaaagtggggtgaccacagagacggatgaagcgccgctcattcctgcatccggcgcagatggcgtgtattccggacgaagtcggtaacacacttcccgttgcacatcatccacccacaactgccaggccggaccgacaaggatctgtaacgccacattcaggcggatcgatcccatctgataatgaacagcgggtaacggcagacgataaaggtggttcgcctgtccatcggacgtgcacagacgatatccggaatcacgcagggcataatgtagcgcatccccgactgtcggggagacggaagcaggaatacgcagatgaacaatttgttccagcgggtaacgctgtgcctgtgaaggcgaaatatcaaccagccggtaacggtcataacgcaccacttccggggctgacggataaatatctgggagcagcggctgagcataaccgacgttgagcggaatcgcgatgtctgccgccgcttccgtaggctgggctggcttgtctgcacagccccccaacaacagtgaggtcagggcaagacatatcgggagagttttcatacgcattttctgtcctgagttaacaaaataaagtcacaggcacactgtgcgcagaaaagcaagcgctctcaataggaaattagttttccgaaaaaaaagaaaacggcgggtgtaaaataccgcctctaaaagaggtggttttaaattgggccccctataagggggctatattctttattaatcccccaacaattccatttgttggtcgagctcttgatcaactttatcctgatgccttacataacgcctaatgatgacttcattaacccccaccgtatcagcaaaatatcccctagcccaaaaatgattaccccaaagtttcttacgtatatgtggaaatcgattatataaccttatcgtactacgtcctttcaggactcccattagtgttgatattgatagtttaggtgggatcattacaactaaataagcatggtctggctgaacatttagcaccaatacttcacagtctttcataatgcagagaatataaattattctataaagctcttttcctactttatctttcaatatattataacgatatttaggagtccaaactagatgatatttgcaacgtcaatacacatgtgatgaacttctgtataaacccatgttatttcctctttacttgtggtgagtaagaggtagttttttaacatgggtttccttcaggctatagcctcacagggtcaatcatcacctgcttaggtggtggtttaaggctgacaataaaaacccgctttttggcacaggcggattttactataccctaaaagttaatacttccctgaaccccgatctctctcggattacctagctgtgctttattaccaaatgcatacgttcgatataaagcatcaccaatatttttcgcatagatactaagttcatattgctttgtagggtgccatgatattgatgcatcaacaacagtataatgcccttgttctaaattattttgctcattaaagtaaaatggtccattaaatctgactgcaatccgagaagaccacttttgctccttgccatataagccctcccatgaaattaatgaactataactaggagtataagcaggtcttttatttttatgttctccactggtaaactctgattgattgaacatgccacccagtgaaatactatgattaggggtaagctttgatttccaaagatattctatccctcgacttcttgaatctcccatattagataatgcctgataaccaataacacctacatatccttgaacatctttactatctatttgatataaagtaatttcggccatatggttatcattaacactgtgccatttccaacctaattccatttccgtggcaatttccgatttataagaagtcagagctagtttatcaaccccttctttgttaaaaccaccaggtttaaaaccgcggccaactccaaaccatatacgattctgctcatttggaagccaggcgatacttgctcgtggaataaaggcattaaaaactgcattattattataattagactcaccttttcctttttctaaaataatcattcgagtttttgctttttcgtgagaaaaacgagcccctgcacctaactcccaattgtcatttatcctgtatgcaccatcaaaatatccagagtaattataaatatcattatcagatttttttcctcccattccgactttccctacagataaattatcatgtctataacccatcttttgaaatgatacccctataattccacttagatcccccccctcataattagctcttgcttctgaatacaaaatatcctgagaatcatcttgtaacgttccgtccataaacaatctatctatatccatattttgataagaaagtatcgttttaaacttccattcatcattaaaatcataacctgtattccaggaaatattttttaatttacgtttaagattaggtgtttcatataaccattcagtatcaatttttgaacgtgaaagaggtgaaaaaggaacaaaatattcctcatgagaatggtaattttctccacctacttttaaattagactcaaataatgtatcaggggaaatataattagcagacaaccatccagcttttatatctctgctatcaacattttttttatcccatgctggattgttcaaagaaccattatttctatcgagactaacattcccctgaaaagcccagccgttttccatgtagccagtgcttcctcctgtattgattctttccccttgaccaaaatattgcccccctaaccatgcttcagcgtgactactgggttttttggtaataacactgataatccctcccaatgtgccacgcccataaataactccttgtgggcctttaagtagctcaacttgctcaaccccttgaagagattgagcatacgattgagaaagctggggagcaccatcaacaaacagtcccaaacttggagaaaagaaatcggccgaagattggccccgaagagtcatattgttataaatacgcgaacttcggtttgcagataacaactcaggaaaaactgcgctcaaatcatcagtttgattaactaaagatttttttaactgttcatcagtttgaacattcacattaccaattacatcaaaactactttgaatgcgcttagttgcagtaacagttattgtattatcatgctgttctgtggcagctacagagcttactgttaccattgtagccgctacaaaagatatagatttaaataaagttcctttattttccatataaaccccaaaatgtgcaatggcactttacgccgaaatgttaatgcgaattaatatcatttgcattgttattattatttgaggttgatcacattttgagcatgaaaattatatatacttatgaaagtgtgctgagtaacagaaaacatgaatattaaggtgggttaatagagtgcaaaccaatgacaaaaaacaaaaggatcattgctgctataaatcaatctgttatgagttatcagccaacagaaggatcattatggctataggtggggtttatatcacccaaacccttatatcaatgattatcatgcaatctgtaccaaccttactaagaagtgaaggattttctctctctttaattggattgacttcactttttatgcttccttggacacttaaatttttatggtctccatttattgaacgcctgagattaccttttggaaaaaaatttcgccgttcacgtaacttgattcttattggtcaatcattggttgctcttttagtttttttacttattctaataaaccctaacgataatataagcaaactgaataatctttggatttttggaatatttatcctatgtgcattcttaacatcgactattgacattgcatgtgatggcatggcggtagaacagattaaggcaagtaatagagggtggggaaatattgcccaagttggcggaggagaaataggagcattattaggcactagtggttttttattaatttccagttattttagcttaaatactgcatttgctatatcagctctaaccatcatattacttacaattccaacactctactttaaagaatcagatagactaaccacatctgaaacttaccatatacccaaattatcatatgcatttaatcgaaaagaggtaagaattggtattttattagtagttttattagaaggaggtaacagaatcacagatatgattaccggacctctattaatagatataaatattacattaaataatattgcactattaataggaagcttcaatttttgtgcaagcctatttggaacacttttaggtggtatattaataaaagtatttggcatatggaaatcaattttcattacctatggtttacaaggtttaatttttactttcatatccatggctataggaataaaatatatcccacatgaaatactttttttacttatagggttcaaatatattcttttttctgcaggactagtttctttttacactggtttaatgagcttatcttcattgaaacaagctggtattgatttcactattttccaatgtacaaatgcttttacagcaatcattgctactctattaggcacttggacagcggagaactggtcttatcattttgtttttgcaatatcatctatttatacttttatcgcagtactaatttccattaaattaataaaaaaacgccttaaactaaatatttcatcaaacaattttgagcaatatgtataattagtaggaaattgaataaggtaattacagaatggataactatgaagattattatactcagtctgctgaaatgtatgatattttaagcgaacctcattgggaaactcgtaaagatacatttataaaatccttgaagtttatgggagtaaaaacaggcaactggttaaatataggttccggcactggccaagaattaagtataattgcgcaaatgtttccagacatacatatttttgcaattgaaccgtctgcatctatgcgtattggcctaatgacaagaattatgatgttacctgaaatacaacaccaagtaactgtgattgctgatacatttcaaaataccattctaccaaaatcattttctgccgctattatatgtggctgtataggatattttaatcagaatgatagaaaaatattatggaataagcttgcaaatgggctagaaaaaaaaggtgctattttggtagatacaatgccgtttaatacgccttgtaacatttctaagatactattaaatagtaaaaaaatagggaaccatatctatgaaatttatttaagtggcaaacctatagatcaagaggctattcgttggaatatgaattttaaaatcatagaagacgataaagtcatacgaaattttaatatagaaagagattggtatacttttggaattgaacaagtaattaaggaggcatcaagagaaggattggtccatgaaaacattagctcaagtactgtaccaatggcaatcctccgccataaataactcataattaaggtatagaaatgaaaatattaagtgatattaataacataaaagaattatgttccaagcaaataaacattgacaaaaataaattttcagataaggacaatctgataaaattaggtcttgattcaattggatttatgcaatgtttatatattttccaaaaaaatggttatgctataacattaaaagatttgtatttaaatccaacaataaaaggatggtataaaatattaaaaaaatcagatataaataaaaaagaaagaaaagataatatatatacacataaaacaataaaaaatgctggtgagttttcacttacacctatacaacatgcctattttgtcggccgtttgaataaacaaactcttggtggtgttgcttgccaaatttatcaagaatttgatggcacccctaaatttactccggaaagtctagagaaagcattagtattattatcaaaacgtcatcccatgttgaatatagtatttcaccaacagggtacacaattttggtctcctaacccaaatagaaaatatgttacatatcatgattttagtaaattaccaaaagatgagtatgagaaaaaacttttacaattacgggaaaaattaagccatcaggtactaaatgttgaaagcggtcagttaattgattttcacatgatatcgctacctaacaacagatatcgtttatgtactaatattgatatgttgattgcagatggtacaagttattcattactctttactgaactttgtttattattgagcggagaaatactgcctcagttagatgagcactatgacttttaccattatttacaagataaaaaacagtatgaaaacaaagaatcagcatatcaatattggaaaaataaaatcccaaacctaccagactctcctcttctgccattatatatggatccagaaaaaataaataaaataaaaattaaacgccttagctggacatttagctcaaaagaatggaaaaactttagtaatttggctaaagaaaataatattacaccttccattgcattagcaacctgtttctcatctgtacttgcaagatggactggccaaaatagcttattactcaactttacattatttgatagaaagccattagcccctgcagttaataatattatagctgattttactaatgtcattcttttagaaatgaaaacagacaatcgaccattaatttcattatctaaagacaatcaaaatacatttattgaagcttggcaacattctgattattctggtattgatatcattagagaccttcgtaaaaatggcacccatccttatgggtgtcctgttgtctttactagccatattaatcaaccacttattgataaaaatatagaatctgtattaggttctataggatggggaatatcacaaaccccacaagtttggcttgatcacatggcaattaacaaaagtggaaatattgttttacagtgggattataacaatgacttgttccggaatgatgttataacaacaatatttgatgtttatatttctcgtatacgccaacttgccaacgatcctaatgcctggattgaaacccaacctgatttaattcctaaaaaacaattaaaaaatagaatatcagttatcaaaaaagataattcactattaccacatacactgcataagtctattttccataattattcaaattcatcaaaaattgctgtcattgatatcgactctcaggaatggagctacaaaaaattattatctaaagcaacaatactcagtgatcaaataatacaacaaggttataaaccagaagacagaattggtgtatgtatgccaaaaggagtagggcaaatcattagcgttctggctattttattaatggggggaacttatgttccgattgatgtactacaaccagaagaacgtataaaccgcattgctaaaaatgctcagctttcattactcatcgtatctgatagcgatccatcctattcaatctatgctacattttgtaacaggattgtttggcaaaaagttcaaccctccgagaataaaccactacacaatatagatatatctcctcatcaagcagcttatgttatttatacttcaggttctactggagagcctaaaggtgttgttgtatcccatgccagcgcaatgaatacctgccttgatctcaatcggcgatataacatttcagacaaagatcgggtacttgccatatcagcactacattttgatctgtctgtttatgatattttcggtgttttaaatgccggagggactcttgtattagttaaagaagatgagcgccgtaatcctgatgcatggttacgacttattaaccaacataaaataacactttggaacagcgtacctgcactgtttgatatgttactaacctatgcagaaggaatagggtcatccattccacaatcgctgctattaatctatctctctggagattggattgggcttgatctcccgacacgttactataatttctgccctgatggacaaatagtcgccatgggaggtgccacagaagccgctatttggtctaactattttaatgtcacaacattagacccatcctggagctcgataccttatggatatcctttatccaaccaacgttatcgtattgttaatgctagaggagaagattgccctgattgggtatcaggagaactttggattggtggtgcaggcgttgcgttaggctacctaaacgatcccgaaaaaacagcacaacagtttgtaaaacaaaatggtgaaaattggtataaaacaggtgatatgggaagatatctccctggcggtatacttgaatttttaggaagacgtgaccgccaagttaagattggcggataccgtatagaaccaggggaaattgatgctgcattcaataagcttcagggtgtgcaaaatgcgattacactatgccttggtaatggtaataaagaaaaagcattacactcttttgtgatactaaattcgggtaattaccaggatattatcagttcaaatagcaccttttctcccctctactatctgcgctcaaccccaataaatgtacaacaacaatcccaagaaacggcaatcatagctggatttttatatgattatcttactgaacaaaatattgatttcgacaacctcttgtcagaaaaaaaatcagcagatgaccatagcattatcgctagctatcagtcattaatggctaattggctaaatttaatagcacaatatccacaaactacactcaattcccccccaactaatagtacccagcgaacgctaatagaaaatttgcagcgccacaaaaacaatttaacagacatactcaaaggtaaaaaatcagctctaacactatttgatgatccctattggtcaccagaacaagtcactatgcgtattgatggaatgcactactccttagaaaatttactacaacaaataagagaacttcatcattcactaaaaaggccaataaaaatcattcaattaggtgctagaagcggtatttcagcaaattatattctgcaacgattacccactaatatggttaccctactgctaactgatgagtctctttcaatggtaacgcaagctaaccaaaatttatcagattatcaaaatagttatgctgagcctcttacagaagtatttcttcataaaaatcgatatagtgcagatatcatttggatgaacaattatcttcatcgattagacagcccacaaaaagagatacaaaaattcgtttcactctgtgctccgagtggaatgatttttatacaagaagtgttacatgcccctgcacaatcactgataagcatctctttattacaacaaaatggtagtgatcctgctgatgaattattaacagcaaaaaaatgcaaagatatctttagcgcttctactgcgacttataaaagtgaaggagttaacggcgaaatattgacacagttataccaagcaccagaaaaaatttatttaccagataaaaataagctagagcatgatttgcgccaatttttaccagactatatgatcccaaaacatatttattttctaactgagttccccttaaccgcaaatggcaaaatagataaccaatcattaaaattgtattgtcaggaataccaagaagaatacctaaatcaacaacctatcaatggtaaagaacagatcatcataacaatatggcaaaagctccttggcaccaacaagatacaccgtcacagtcatttctttcgtgaagggggagatagcctagttgctattcgattgatctctgatttaaaccatattggctaccaagttgaactggagcatatctttgcttatccgatcctttctgattttgcacaaaatataaagcagagcgaagttttcgaaaaacagccagcaatttcacataacgaggcgtatagatacaatccatttccactcactgatattcagcaagcttacttagttggacggcaaaataattttacacttgggggtgttggtacacatttttttgtccattttatagcggaaaatttagatgtacctaaattagaacgtacaattaatcagttgatttctcgtcatgatatgttacgtggtgtcattattaatggacaacaacaagtacttaaaaaagttccttattattccgttaaaacgcattatatccctacagaaaaaagtgactcttttctagtattacgagctcaacttgctaacattgtttatgatccagaaatttggcctttatttactattcaagttatcaaaaccaaagaacaaccagatcatatttttattagccttgataacttattccttgatggaatgagtatgcagatatttttcagtgagctaaaaacactgtatatggagccaaatcaccaatttatccctctagatattacttttcgagattatattgattgtgatgcctatccgattaacacacaaaatgattgggaatattggttaacgcgtttaccacaattaccaccagccccacaattgccactaataaaagatccagcacagattgtgcaacctcgcttctcgcgtttacaaacatcattatctacttctgtttggcaagcactacaacaagttgctcagcaaaataatgttacgccagcagcacttttgattgctgcttattgcgccacattatccgcatggagtaaaagccctgagttaacaattaatttgacattatttaatcggcatcctgtacatcctcaaataaatgaagtacttggtgattttacctcattacaattactcgattggtatacctgtgatctttggtcaaacagtatctcaatgatgcaaaaacgtttacataaagatatgcaacatcgtagtgtttcagccattaaagtaatgcgtgaaatggcaattcaacgacagatgtctcatatagagatacctgtcgtttttacctgtgcattgggctataaacatgatgaaggttttctttctcatcattcatggctaaaacctgtttggggaatatcacaaacaccacaaacatggctagatcatcaagtatatgagtcagacggtgaattatatttaaactgggattttgtcgaacaattatttgactacacaaccattttttccatgttccagcaatatgaacatatactcactaaactggctactgaaccacaatcttggcaattgccactaaataaacttataccaagatgcaataatctcgtcatcaccccagttttcaatgccaaaaataatcaaaacacacattataaacaatctactgatacacaaaaaacaggtcagacaatacaaaaactacaacaacttgttaagcaagttattggaataacgttagcacctgaaacaaattttttcgaagcaggtgccagctctttacaattggttcaacttcatgcagcactacaaaaaaatggctatagccatattacaattactgatctgttcgctagtccaaatctaagtacattagcgcaattgctttggcaaaacacttcaccaacatgtgagcaatattccgaccgagacaaacacaaaaacaagagaaagaaacggttacaactacgaactcatagtagataaaggatattaatcatgctgaattttgaaactttctatggtaatagtgaacctatagctgttattggtctttctggtcgcttccctgatgcacaaaatattgatcaattttggcataacataattaataaacacgatagctctcgtcttttttctgaagaagaactaaaagccgcaggtgtcgctgaacaaacttatcattcacctgattttgttaatcgtggcgcgccgttagatgaagcggaatattttgacgctactctatttaattattcacgctcagaagctgaacttatcgatccccagcaaagaatttttttacaaggtgcttggcatgctttagagcatgctggatatgccccttgcaatataaccatcaaaacaggcgtttttgcttcagcaagaatgagcagctatcctgcccagcaagatttagcattgcacaatattggccatgtccgtggcatgcaaaaattattagggaatgataaagactatctcgcaacacgtattgcatataaattaaatttaactggtccagcattaactatacaaaccgcttgttctagctccttagttgccgtacatatggcttgtgaaagtttacgctctggtgaatgcagtatggctattgctggtggaattggtatcacatttccacaaaccggtggttatctatatcagaaaggcatgatcttctcaccagatggtatttgtcgtccttttgatgcagaggcaaacggtacttttgctggtaatggatttggtattgtagtgttacgtcgtcttgaagatgccttagtggatggaaacacaattattgctgtattacgtggtagtgccattaataatgatggtcatcaaaaagcgggattcacagctccctccgtagcaggccaagtttcagttattagagaagcaatacaactggccgatattaaaaatgaagatattgaacttattgaagcacacgcaacagctacaccattaggtgatccaattgagtttagtgcattatgtcaggttttcgctgatcgctctcttactgcttctaaatgcgctattggctcagttaaaggcaatatcggacatctggatacagcagcaggtatcactggcctaattaaaacgatattagcggtaaataaagcacttattcctccatctatgcattttaatcacccaaatcctcaattacaaatagaaaaaagcccgttctacattcctaaaaaccctaaagcttggtctagcagaatacgaactgctggtgtttcttcatttggtattggtggaacaaactgtcatatcattgtgcaatcattgcctgactcattagtatcaatcaaacctgaacaagaggtagacaataattttgaatactcattattgcttagtgccgccacaaaagagagtctaaaaaaacttgctggtgattatgcaccattaataaaaattaccccagcaaacattctggctcataatgcattacagcaaagacaactcaacttaccatggcgcttatctatccccttaacaagtgagagtgatatttcactgttagctttctctcaaggaagtgctgattctttaatacaatatggtcatacatcaacaaataagaaaatagcgtggctattttctggtatgggatcacaatatcctgctatgggtaaagtgatgtaccaacattcaacaacatttgccgaaacaatcgatcgttgtgagcaagcatgcctgcaacacttaacatttccgttaaaagaagtcatgtttggcctacatagcgataaacttgttaatgccagttatattcaagcggctattgtcgcctatgaaatcgcaatggcagcacattggcgagcaatcggtattttacctgaaataattgtaggtcattcttgcggagaatatgccgcagccgttatcgctggtttctatacaatcgaacaaatgatgccacttgctgtatatagtggacaattaatggaaagtcatgttaatggtgaaatgattgctgtatttgcagaatatcaagatattcaaatcattgctaaacaatgtcatgttgaattagctgcaattaatggccataacaacttatcattcgcggggcaacccgatgatatgcaaaagtttactcaaatattgaaagcaaagaatattcgatttagagaaatgaataacgtgtgtgctgctcatacctcttatattgataatattcttgatcaattgatggaatttactgagtcattatcagcctcacaaggaaaaatagccttagtctcaggctatacagggcaattaatttctcaaaaagaacttcaacatccatcatattgggctcagcaactacgcaatacagttatgtatcaagatgcaatacaaacgttagtcaatcatggtgtcacccatgctatggaattaggaccaacttctgtattaagtgatcttggtgaacgtgaaggcattactgagattagttggataccaactgccagaatgggagttgatgaaattcagatgaaacaacaggctgcaacaaccctatttattgcaggctatgatttaccatggcagtcactgtttaaaactcaaggaagttatataccattacctctctatccctttgaaaaacaatattattggtatgaaaaaaaggatagtgaaaaatatcaaccacaaaaaagcgcatttgatttacctattagccaaggtcgtgaaacggcattaaaagcgcttacaacactcgatcttcctcgtttaaactcatttaattcaacacttaccactttacataattattacgtcgataaaatgatatgctcgtgtttaggccatgagttgaatacccccatgtctgtaatcgatattatgcgagcaggacgcattttaccccgctattatcaattattagtacgtttattagaggcctgtgttgaggatggatattatatttaccaacagataaatcagcacaactactataaaaaaataaaatctatttctagtgataaattaccattattattccatcaattacaattagatagcgaaggtcttcaatctattcctgacaccgtcaagcgagcaggagagcaactctacgatatgatgacaggcgtgattgaacctgtttcagtgatctttcctgaaggtgcatctcaaggtgttgaagttctctatcaagattttagttttggtcgttattttaaccaaattgctgccgcggtacttaaaggattactttctcactaccagcccactgtggctaagcctttgcgaattattgaagtcggtggtggcacgggaggaaccacctcttggctgctacctattttatcaaccatacaacatgttgaatacgaatttaccgatatttcacctatcttcacccgacgtgccgcacaaaaatttagtcaatattcatttgttaactatcgagagttcaatttacaacaatcccctgaaatacaaggttttcaatctgattattatgacattattattgctgctaatgttattcatgccactcaacatattggagatacattaactgctcttcgtactttactgcgttccaatggtcatttgcttatgcgcgaaataaccaaacaagctcgcttatttgattttgtttttggcccactggtgttacccctccatgatgaaaagatccgtaaaggaaaactatttttatcaccagaattatggcatcaacagtgtcgcttagcaggatttcaacatattcgctggttacctgatgcattaccagaaaccaaagatatgtgtgaacatattattctcgccagtgtttcgacagaaaacgatcactttgatcaagagttacctagtgacaccaagatacaacaaagttcacactaccaatggcaattaacaccttgtgtggaacaagatcttatcaagccaacattaatatttaaccatcaacaaacattgccttctgaaatcacagctattttatccgctattggatgtctttctgaacagggcgaaaatcaattaatcgttgccaaccttgcagatcctttaattatcgccgagcagatccgccaaatattactgtcatcgtctgatgggtttgttgttatcacgcaacaagcctgggcattaactgccatagaaacggttaatccagcacaacgtagtattcgaagtttattaaaaactattcaaaaagaatatagctcaaggttaattgccattgttgatttaggtataaatgcctcatggtctgaattagttcctgcttttatacaaatagaacaaggtaataatgaaattattgttcgtaaccattgctgctacttaccacaattaaccccactgccctcatcttctacgatcatagcgcagaacatcatggtatccccgcgctggcatattattactggtggttttggaggcttaggtcgaattacagcaagttggttagtaaggcaaggtgctaaacgtatcgctattttggcaccacgagctgatagcagcgcattagattggatgaataacttacagaaatctaaccagctagaaataaaatggctaacatgtgattgtcgtgataacgctaaatgtcatgcagcactcactcagcttgaaaatgaaggtggcattgaggggcttatacacagtgcaggtattttggatgatgcacttatgacacaactcacccctaagcgtatgtctgacgtattttctgttaaagcgatatctgccaagcaattttgtgatgctttagaaaaaacagatgccagttaccttattttatactcctctgccgctgcaactataggctctgaaggacaagcagctcattccctcgcttgtggatatttagatggattagctgaatatgcacgtcgcaatatcaagggattaaccgtcatttctatcgcttggggggcatggcaaagtgttggctttgtggcagaaaaacaactccatgataaattacaacacaaaggtatgagtacgcttactactgaggaaggactggcacatttagatgcttgtctgctagataatacctcttgtcgccttgcaatgcgcttagcgactccacctttaatgacacaaaaaacgcctttatttcatcagactaatcataatgatcattatgataaccatgaaattaatcacactcgccagctttgtgaaaccccaactcaaacggatcaaacagagccggtaagccctaacagggttgattatcgcgttggtgataacttagaacagtggctaacagcatgtatcaaacaactgttgcgtcttggtgatgaacatattgatactcacattgaactattccaattaggactagattctctctctttcctcgatctcagtgcggaaattaagaaacagtttgcggtcaatattgacgctgaacaatcttatgatgatatgactattgctggtttagcctcagttattcgaaccgcagcacctgagaaatttactgtgacagaagcactccataatcaagacaacatttcccacacaatggagtcagaacgatatgccccatttccattaacaccaattcaacacgcctattggatcggacgtaaaaacctctttaactacggaggcgttgcttgccatgcaatttttgaatgggattgtcaacgccatatatgggagccggcctcacttgaaaaagcttggaataaagttattcagcgtcatgatatgttgagaatgatcatagatgatgatggacaacaacgtatcttaaaagaagttccttattttcattttattcaacatgacctaacaaatttaacccaacaagagcaacaagagagcctaacacagataagggaagccctttcttatcgggtattaccgactgagtcatggccattatttgaagttgaaatttcttggctaaataacgattgttacagattacatatcaatctagatttactgcagtttgataccatgagctttaaaattctgtttgatgatctatttaacgcctattcaggacaagaattaataccacaaacatttaccttccgcgactactgcttaaaaaatcaaacaaatcgtaacagtgatgagtggaaaatggcatggtgttactggcaggatctattatctgatttaccttctgccccatatttaccgataaagaattcatccattactgaacaacctcgttttacgactttccaacatcatgtttctatagcgcaatgggacaaattaaaacagaggtggaaaaagcatggtattacaccatcagcagggcttttaacactttttgctttagttttaggtcgctggacaaaatacccagcctttacactaaacttaactttctttaatcgtcaaccatggcacccagatgttacacaacttattggtgattttacctctgtactccctatagatatttatctagataacgactgtacattaaatgagtcaatggcaaaaatacagcgcagactttggcaacatttaagtaagtcccaagtaaatggtgtagagattttacgtgaatggggacgctataaaggggatagtagccaatctctgttacctattgtatttactagcatgttaggtatgacactagatggtgacaatattgatgaagcattaaatcagcttttcggccaacccgtatatagcttcgcgcaaacacctcaagtttggttagatcaccaagtaatggaaggaaaagaggggctaacattaaattggttctgcatggatgacatctttgctgacggtttattaacaatgatgttctctgattatcaaagcttgatcactcaattatgccaagatgaagataataatcaatcagttgataagattattgcgcaacttccttcatatcaacatttagcaatagataatcacctccaatcacgctatcaacaactcgagcaaacattggaaaatcatccgcaaatcaaacgtgctcatgctatggtaatggtaaaagacgatacgaaagtagagcctcctctacaattactgtttgaagcctcttctgatattccactatccgttattaaacagcccaattggttacctaatttactttcgccatcagcttcactcagtgacattattgaaaagagttggcaacgatttgaggaacgagcacggtatggcatatgtcacacactgtatcgaaatgctctttttaccgagctaaacacaccaatcaccctagctgaaatagtggctcgtttaaaagcaaagcctcagtatgagaggctacttagtcagtggctagatttattatgcctgcatcacttattaaccaaagagggtgatcagttttatgccacaacacagtttattaacttatgtttatctgccccagtatttcaacaacctgttaatgattgggaatatgtactttgggattaccttgaacaatcactaacccaacatgaattactctttagtggtaaggtttctcctctttcactactttttaattcagatgaaattaccacagcactatacgccaaacaccctgcactaaattatttaaatcaatgtgcaaaagatattgttagtgcaatggttggtgcaacatcttcactcaatattttagaaataggggcaggtacaggagctaccactcaaggtatagtcgcagtacttaagaatacgcattactcatacacctttactgatatatcacattacttccttgataaagcgcgaaaaaaattcactgctgtaggagaaatgcgctatcaactctttgatattaatgcaccaatacaattttctcatcatccagataatggctatgatctgatcattgcatctaatgtattacatgatgcatcacatatcggccacgcactaaaacggattagaagcctgttaaaacctcaaggctatttattatttatcgaagcaaccgagtgtcaaagtgctatgcaaatggcgactgttggctttattgagggattaagtgcatatcaagataagcgtatattgacgaataaagcgatgcttgatagtgaaagttggcatgatattttaatcaatactggttttgaaactattggtcaatggccccaaacagattcctcatctttgcgacaaacactctttttagcctctcccactcgtggaggaaaaccttatttaggtaaattacgtgattatttatctcattctcttgatcagaatatcgactcttttgagttgttccaatgtgaaaatattgaagcaacccttaatggcatagcaacatcatccgctcaagagctaaatgaacagatacaacctgttgcaatacctgatgtaccaaccaatatgattaatgaaatcattgcattatggtctgagttattaggtcgtgaggtcaatagtacaaatgatttcttccgttctggaggagatagtttgattgcaaccaaaatgatcagccaattacatcaacggggatatccagcaacattacaacagatttttacctatccatgcttagccgatttttgtgctcatttagagcaggaaaagcaatctcaacgagagtactcctctttgatacctctaagcgctgtatctgctccaaaaccttaccactactttatggtacatgcttctgatggtgatcccggtgtttacctacctcttgctgagtcgttaaataatacagtgtggggattaacagttacagatgcttcaaaactaactgatttggatacattgttatcattacatttatctagcataaaaacagcacaacagactggcccttatattcttattggttggtcatatggtgcttttattgccagttaccttgcagaacaactctcgcaacaaaatcattccgtattattagtattaatagatcccgtctatcgacatgattttattaaattttgtcatgatgactcagatagttcatcagatgaaaataagcagcttgcatgcactaaaagacttatgtcattcctacctgaaagtgacctaccattatctgatgatatcgcctgtttatggctggaagccaccaaccacccaacagaatggacatcacctgaaaaagagtggtaccaacgattaccgccacatacccaacatcactatttttcaggggagcactggtcaatactgcaagatcgcgctaccagcacacatctggccgaaatcattgatcagtgggtgcaacaaaaactttctaataacggatatccatccgaaggaggtaattaatgaaaccggcaaaaaaagtggtgattgtaggcagtaaatttggagaggtttatctcaatgcatttatacaacctcaagacaaatggcatcttattggccttttttccaaaggtagcactcgttctcgagaattatctaaagcattcggtattccactttttactcgatttgatcaactacctgaaaaaatagatctagcttgtattgttgtgcgatcagccattgttggtggcgaaggtagccaacttgcgcaagcatttttacaacgggggatctcggttgtacaggaacatcctgtacatcctgatgaaattaccagactacaatcattagcagaaaaaatgcattgccactatatcgttaacagcctctatccacataataaagcaggacgtttatggatagaaaacacacagaagatatatcagcaaatacaacaacgaccagtgtggggacaaattatcacaagcaggcaattaatttattccgccttagatatatattgccaagcaatgaaattacaccctaatgatattacagtcacattagaaaaagataataccccgctacaatttctacgactatccaaccctactggtgatttgcttttatgcctacaaaaacatttgtcatctaacgatcctgatcagcatagcctcgtgatgcatcatatgatattaggctggccagctggttatttaactctcgctggaagttatgggccagtagaatggaataatgcgctttatattcatcatcaccaagatagtaaaaaagccatgtatcaatctcctgccacgatggagcttgatgaaccactgtttcattcatttcatactccaccaaatagttggcaggatgtgatggaatgtgaagcaccagaagctattaattacttactggcagagatagataaatgctggcaattacctaatgataaaaaaccaatgattttacaaccccattaccaattagctttatctcaattatggataaaaacattgcaaacagcaggtaaagccattgatggcacaattgcgccatttaagcgaatgaacttcaccaaaagtagtggacggagaaaataatgataaaacaatctcccaaatatattactcctttaaatgagcaaaatgtaaataaagacaatgctaacctattggtttgcccatttgctggtgccagtaatagtgcatttaactcgtggagatctaccgatatttcagggttaaattgtcaattagttaattactctggccatggttgcagatttaaagaaccagcctttaatgatattgggttattagccaatgaattaataacaataataaagaaattttatccaccacggcataattcattattactttgcggtcacagtatgggggcccaagttgcctttgaaactgctattcaattagaaaaaaatggctgggaattatctggactaatattatcaggctgccaagctcctcatattcaagcaaggagattactgagtgatttaaatgatgatgactttattcaacaattaattgccattggtggatgtgatgctgaattaatcaagcagccacagttgttaaaacagtttatgccattattacgtgctgatttccttgctaccgagcgttatttttttcaaaaaagcactaaacggctttttcatacccctgttttattaatgtatggtagtcatgatagtgaagctgataaaaacgaagttgaagcatggcaagattggatagataagcattgcactattaattgcatcgctggagatcacttttatccaattacacgcccaaatactttttgtcgttttattattgatttttatcaccaatttatcaatgattaaattgattaggtaatatatatgaataaaacaatagatactttgccacttaactttcgtattttaataaaattagccccactccctctgattagtggcattattatggcaataatctcaacaatgctaagtttagcaccattatggatcatctataaaatcagccagatttgtttttcaacatcacctaatattcaacaaataaataatctagtttatatcactgtgattattttaattttacgttggggattaatggcaataagtcatattgccgcacatcggggtgctttttatattcagcatcaattacaactcgcaatagctaaaaaaatcagtaaagtaccattatcattttttgctcaatatggcagtggaaatctgcgacgtattatcaatgatgatataaaaagcttagaaggttttttcgcacatatgctacctgatctcgtctcagccatagtgactccctttatcgctattatattacttttttatgtaaattggcctcttgccttattatctctaaccccattacccattgcttttatggctcaacttctcatgttgcgtcgagccaataaacaaaccaatgagtggatgaatattcagaaaaaaattgctaatgaaataggagaatatattaaaggaatacgagaaataaaagcgtttaacttaacctcccatacttttggtaaattatctcaatctatcaattcctctgttaaatggataaaaaataatgtcaaagctagtacaggctcttggatggtatttagtgggatattaacagcgaatctcgttattatagcaccagtaggtgggtggatgtatttaaatcaaaatattgatttatctacttatattttatttttaatgacatcccccctcgtacttgcgccgttattacgactaacatttgtgctaggagaacaagctcaacgaaaacaaaccttaaaacatatcagtatgatccttgaactttcagagcataaacaacatgataaacattttactctccctaaaaatagcgatattacttttaaagatgtctgtttggatcatggtgataaaccgatattagagaaaattagttttaatgcccaagcgggtacaacaactgcaattgtaggccacagtggtgcaggaaaatcctcattattaaaactaattccccgtttttatgattgtacttctggccaaataaaaataggtcaatatgatatcaactactggccagaaattgatttactttctcaaataagtgttgtttttcaagatgtatatctatttcatggaactattttagaaaatttactcatagcaaatcctaatgccttatttgaggatattatcaaagcaactaaagcagccaatattcatcatgttattgaaaaactcccagcaggatataatacattaattggtgaacaaggaaataaactttcaggtggagagaaacagcgattatcaattgcaagagcactattaaaaaactctccaatcctacttctcgatgaaattactgccaatgttgatgctgaaaatgaaattttgatctatcgcgcattaaagagtctatgccagaatcggactgttattatgatcactcataacctacatactattattaacgcagataaaattattgtgcttgataatggaaagattattgatacaggtacacacacccatttattaaaccaatgcccaacctatcaaaaattatggaatgattatagtcacactattcattggcaattaatccaggagaataataatgattaaagaattaattaaatcaggttatttgctttctaataaaaaagataaagatttaatggtgggtctatgccttgccgtagttgaaggtctttttgctactattccgtatattctactctattttttattaattgatctttttgccaataaaatcacactagctcagttattttattactttttatcaatactcttatctattgttctgcgtattgtcattggtacttatagtatgccaatgatttttattggtgcttataaaatgatgggacaagcccgtctaagaatagccgatcatttacgaaaaatcccgattggctggttttcttctcaacgcagtggtgatcttgcatcacggcttactgctgatttagagatcattgaaaatatctggtcacatttcttaggaatgtttatcagtactttagcgatgcctgtttttctctcactattcttagtatgggtagattggcaactcactttaattatattattttctattccaatcgctctgttcgcattatccataagccataaaataatgttaaaagctgcacaacaggcagctgatgctaatgccaatgtacaatccgaattactcgattatatccaaggaattatggttattcgtagttttgggcgacttggtcctgcatggaaaaaactaaaagcagccttagaaacacaaaataaaacccaaatagttctagattccaagcctgccccttggattgcactttatggttttattcttgaatcaggttttattttattaatgataataggaacaagccgtttaattagtggctcactttctccttctcaattcgtttttttccttgtattagcactccccatttatcgacaattctttgatttaggattatccagtatgttgttaaattatgcacaaaaatcattacaacgcatagaagaagtaatgaaagtggttccactttctgagcctaaatatactcaattaccaataagaacagatatctattttaacaatgtaagctttatttatccttataatagtcaattaacattagataatatatcttgctgttttcctgaaaaaagctttactgctattgttggccctagtggctcagggaaaagcactttactacagcttatttctcgtctatgggatgttaaccaaggtgaaatattgctagatgatattaatattaaccaaataaattccgataaactctgttcatatgtatcttctgtttatcaagatgtcgttttattttcaggaacaattaaagataatattttaatgggaaaaacagatgctcacgatgatgaaataataactgcagctaaattagctaatgcacatgagtttattatacaaaaaccacaaaattatgatactcctattggttacggtggtatgttactctcaggtggagaacgtcaacgtctttctcttgctagaactttattaaaaaatgcaccaattttactgatcgacgaagcaacatcgagtatcgattgttcatcagaagtattaattcaacaagctttatcattgttatcaaaagataagacaatcattatgattgcccatcgattaaatagcattaaaaatgccgataacattatcgtaatggaaaatggaaaaatagcagaacaaggaaaacatgctgagttacttgcaaaaaatggcttatatgcacatttatggttacaacagaaagcgttatgctaatagccaaatgcaatgagtaatagcaacttgtttatagataatgaggtgcatatctggattggtaatctacaaacgataccatgtttaagtaaagctaaatccagaatgcacatcttaaataacgatgaaatttcatcgttattcgactacccttttataaaacaacgaaatatttttttgctatcaagagtcatgttacgcgatattttatcattttatttaaaaatttcaccagaagatgtaagattttcaaaaaatgagtacgggaaaccatttattttaaacgaatcaaaggaaagcatttacttcaatttatcacattcaaataattgtgttgctctcgctatttcaaatacatcatccgttggtattgatattgaatatttcaaccgtgatatagaaataaatagcattatagattattatttctcaaaaaaagaaaaaaaatacctatcttattttgacgagactcaaaaaaaacataatttctataagatgtggacattaaaagaagcctatattaaatcaagaggcattggattatcagaagaaatcattaagaatttagatttttatataaagagagatcaatttgataaattatattttatagaacagcattactctgctcatctttcatatattaccaaatcaatattagatagctataaaatatccataatcacatatcaccatccatttaactataaattcttaacatggggtgatataaaaagcaacctgccacatcatttattatagttatacgaccacaatgaaattatatattaacagttagttttaagtattatttgactgactataggtcatataaaagatatgacaattcaattcatatattcacaccaaaacacgaataaattataaaaaaccatcaatatattagcactcatataaataaggaaaaattatgtttaacaataaaacaaaaaatactattattaaaaataaatccgattggttaaccatacctgaagctgtatacctagccaaccagaaaaaaacagagaaacaattaaccgacagcgacgtttatcgccatgcgctatcttgaaacatttatttatctatatactttcaatctacaattatattaaggaaagtcacaaaaattaagaataaaattaaattgaaaaaaataggaaactctctcacagatcgtttatgctatcttgatacacattgtttcattaaacatataaattataccacactcactcaagataaatatattcattctaaaaaaatgggtcattgataccactctgatcgggtatgaattcgtaacaattcaacacttactggcgcactcaatcaatatatcaccaccaatcacaggcaatcaatgtattaattatggcatttcagttttattatcaagaactctatttcaagcgtttgagaaaataacatgaaaagaacgaattagccaacaactaatgtaattacctgaagaactaaaatctgagatttataacaacattaatcgaatgaaactcataaatccagtgacaaagaatatttccctatttataaattaccacaagattcctgttttgtaattcgcctgactgaactacaaaagctgatgaatgcctatgtaaatattaaacacactccaacatcgacacgcatatccagccctttatctcgtcttttctggctttcatgtaaacataatgaagtcatcagtccattactaggaaaaccttacaagcttttatccattttcgaacaatgggcatctaccgaaggtattactgacaaattcagcggcgatacactgaaaacagcacttgaacgcggttctcccacttcagtgccttattgatttaactcaccattatactgaaatacgtattaagaactcaaaaactcttaatacgggcttacgtgctttcttcttcaccttcgcttatgcttttttatcttctccaaccccactctacactggagaaaatcatgacatcacatcagttattacgcctgaaacaggtcgaagaaaaaaccggtctgaaacgctcgcaaatctatctgtatatgaaagggggctcttttcctcgttcaataataaaggttggccctgccagcgtagcctggctcgaatctgaaattgatgaatggatcaacctcaaattagccaaccgctgaagtgtttaaggaaggtccgaaatcatgattccgtctctgaattacgccgtattaacagatgccctgcgtgcgctgaaagaagacaatattcaccatcgtgaatctctgggactcaccttcgacgaaatgaataccctcaggacaacactggtgctttaatgaaaaaacgaaatttcagtgcagaattcagacgtgaatccgctcagttagtggtggatcaacactatacggttgcagatgccgcaaatgccatggatgtcggactttccactatgacccggtgggtaaagcagctacgagatgaacgtgccggcaaaacacctaaagcctcccctatcacgccggagcaaattgagatacgtgagctgaagaaaaaacttcaacgtattgaaatggaaaatgaaatattaaaaaaggctactgcgctcttgatgtcagattccctgaacaactctcgataatcgggaaactcagagcgcattatcctgtggccacgctttgccacgtgtttggggttcaccgcagcagctataaataccggaaaaaccgtcctgacaagccggatagcaggctagctgtattacgcagtcaggttcaggaactacacggcctcagtcatggctccgaggatgcaagaagtatcgccacaatggccacacacaggggcttccggatggaacgatggcttgccggccatcttatgaggaagctggggctggtgagttgtcagcagcctgttcaccgatatagacgtgggggacacgaacatattgctatcccgaatcacctcggacgtcagtttgcagtgacagtgcctgaccaggtatggtgcggcgatgtgacgtatatctggacaggtaaacgccggacttaccttgctgtggtactcgatctatttgcacggaaacccgtggggtgggcaatgtcgttctctccggacagcaggctgaccaccaaagcactgaaaatggcatgggaaagacgcggtaagccatccggggttatgttccacagtgattagggtagtcactatacaagcaggtagttcaggcagttactgtggcgataccggatcaggcaaagtatgagcaggcgcggaaactgctgggatactcattctaatatactttcaaataccggatcggactgacccgtgctgggattggctcaaatgcctttgtgttgacctgtcgtccgattctggtatttcccgggcataaccgggcccagagtttgtgacctgataggagctttgtgctgcatcccgagtgtcctgtcctgcgatggggatgattgtgctaccaatatctggaggcaaaccatgcaaaacgaccgccaatcttctgaaaccgtgattctgggtgtcgatacccatcttgatattcatgtcggcgctgttatcagtcaggcaggtaaactgcttggaactcacattattcaaacaaatcaagcgggctatctggaactacttgattgggcacgttctttcggtagcctcgaacgagcaggcatcgaaggaacaggaacatatggtgccgcattaacacgctatctcatcaagaatagcatttatgttgttgaagttaaccggccagatcgctcaaaacgccgccttgaagggaagtcagatccactagatgcagaaaatgcagcccggacagtgctttcagggagcagcaaggccataccaaaaatgcagtcaggtgcatgtgaggctctccggattattagtgttgcccgacgtaatgcagtaaaagcctgtacgcaggcgattaatcagcttcgtgcactgctggttagtgccccgcaagatgttcgcgacaaactctggaaatcgaaaccacacgaatgcgtaaccgcctgcattaacagcgaagtgtcagagcactcaccgttacgtatagccttgtgcagtacgcttcgaagccttgcgaaacgatggatggccctgactgaagagttgaatgaactagacgaatcactagataaactgacccgcaagtatgccagtaaccttcgtagccagtttggcgttgggccacagacggctgcaacactgctggcagttgcgggtgataaccccgaacgtttaaaaaatgaagcggccctggcatcgctctgtggcgtaaatccactgccagcatcatcagggaaaacagtaaggcacagattaaaccgtggtggctcacgtgaagcaaacaatgccctgtggacaatagcccttgtacgtatgcgtagcgatccgcgcacgagaatctatgtcgacagacgaactggtgaagggctatcgactaaagagatcctgagatgcctaaaacgctacatcgtccgtgagctctatccattgattttatcggacctcgcatatgccaatcgccgctcttgacataggagcgtcaacagtccgatggagcgctttttcaggagtctgaaaaatgagtggatgccggtgacaggctacaccagcttcagtgaagctgctcaagcgataacgggttatatcgtcgggtattacagcgaactcaggccgcacgaatataacggtggattaccaccaaatgaatcggaaaaccgataccgaaaaaactctaaaaccgtggccagttttagttgaccactacaaaagcttattgatgaacgaactgatgatgttttgtatggtgaaccatgatacaaaaaatggacgatgggccgaatgatctcatttaatacatcttcgccttataccaacgcgaatggaagattaaaaaagtgggcaaaaaataataacaatttaaagtaagcatcagcgtcaaattaatggccgaaaaatcgctctatgcccacatccttaatctgaccacgccgtggcaggttaaatcccttgctctcaataaaaatgcagattctgtaaccggaacaaagaattcttcaaggtggcgataatattccattatggaaagctaaatatggctttctgagccttattaccatgactaaggaataccctattatcaacagtataaaaatgtagtttgcaggatgagcgggctctttaccgtccgcattcgcagggaaattgaaatctatgtcactctgccagatccaaaaataaggttaaggccgcattcctttgcggcgtcttattcctctgttcagaccttatccatcatataacgatgcgctttcgatgctgcctggcggctttaaaaatatagcgcttatcgtttttcagtgctttcagccaagaagcaatataactttcgtgctgaacctatccgacaatccccagatccgccatcaggaacacgcttcccagctcggcgatcaactcttcaaatgcataattttcactgctaaatcttcctttcatttcgcggttcaggcgacttttgccatcgctccagtgaacaatctcatgcagatccgtggcataaaagctagcggcatcggaaaaaaacgacgttcaggtaacaaaacctcatctgttgatggcatgaaaaaggcgttttgtcctttctcaatgatgttagcaccgctgttacagaacagattttcagcctgtggcaacgcgtcaaacgtcgcttgtggggcaacggtatctgccgtcagtgagaggccatcaatttgttcgacattaaacacgacaaaggttttcagcatcgggatatggtcaatttctccggtgtcgttttccttctccaggatggtataaaaaatggcggtcatgccgtgctagtccttacgaacttgcgcaccttctgccctagcctgtttgtatgtcatccagcaggaatcactgaatcctcattctgattcactgcacccgctgtaggctgtgccagtagcgtagttggaaggcatgccggacatacccggtacgcgctgccacggacacactcagggtttaacgcctacttccagtgtggtaatgatgaggtcggtaacgatctgataaatatcggttctggttttggaaaatttcgtttttgaggagcctgacgggtccagcggggatacgctggtcgccgttgcggtgttagaggcacttgtctgagtatgcaaggaagtgatcatagttttttctccatcagtaatgtgattttcatcttcgtatcgcctgacagttcgctttctcggcatcgttctggcccacaagggtgcagcatgcgtgcacttcacccttacgggaccggttgtgccgtgaaatgattaaccggaagctgatacgggaacaaaaagcacacaggaggaaaaatcggtccctgcatagccgaacttagcgccctttactccgtattggtgaaaagtagatttgtggtaatgaattggggattggtactgatagaaacatcttgttggcaccgagatctcaaaaaatgtctagaattaaaacaggtgtgcttaccttaatgtgatagagccctaaaacatgcatcttcaagttaattgtgcatgattataaaaaaaagaggcacccatagagtacctcacttactttatatcttattaaatcagaatatattaaaaatcaattttgacatttatcccataatttcgacccggtaatgggactaaatatttcaattgagaagatgcaggtcttgcttcagtatcggtgagattattaataataaaatcaaccgaaacatctaccttatcaaggtggtattttttgccaatccccgcatcaactaacgtataggaaggaaaggccatatctccaccatacattaacccaccgctttctttttgttttttatagtaagttgcactactaaatgcagttaattcatcatgttggtaataaatactgataccatgcttttcattaggtaaatttggcaaatagtgacctgcaataaacagttttcttttgcttttattttcgacaaaatcaccaaatagtgtaaatgttagattgtgatcatgaggcatttcatataaatatttaaattcatattctaatccttttgtttcaagatcggtgtcatcccattccataacaggaccagcaccacgactgatacccgttaatcgtctaaatttaaaaccactgtagtctgttttatacaaattaagtttattagagaaattgccaatctcaataacagatgataattcaatacttttgcttttttcggtattaaattcactgtttccttgttcttcaattaaataagcataatgagggccatgtgtataaagttcattaatttctggtgctcgataagaaatattttgttgtagttttaatgtccattcatcaattggtgtaaaagatagagcgagtgtatttgcacttgtatcaaaatgacggttttgtaaattagaaccttgccctctaccacgattataattcgctggaatattgagattatgttgagtgtaacctttacgatatccagcagtgagctcaaaaggagataaatttagcgattcaacccaatatattccgtactctttggttaatacactgggtaaataagcatcataaccagacgttttcagatcacgataattaccgttgatcccaaacgcaccattaagtcgattaaatagcggagtatgtgcagtttctaaagctaactgatggctttttgtattaaataccgatgaagcaatttggccgactaactcttcatctttagattcagaataagaataataaaaagcactgtctcttaaaaatggtgctaaatgatcatgttttccttgtatatctattcttcgattactatttgaaaccgaaacaggtttatacctttctcgagttgttttagttgtgagataagcatagcctggcactccatacgatgtttgaaaatcagtgacagaaaaacctaagtaaccgtcatctccgatataagagagtgatgcgttaccactttggctttttaaaaagctattgggaatttcgttattattattttcaacataatgctttggaggtgtgacatgttcaatagatgtggggctaccaggtttatatcgtaagttaggttcattatctacataaccaatacctgaaaaatagtccttatctttaaaggtatatttatcatcctcgcttaactcatattcaacctgatattttttccaaaactcactaatgtaaggatacgcttcagggttacggctagtaaacactttcatatccacttggcattgatcacgtaatgcagagtggtcttttagctgttgatagctatagcaagcaccaactttagagcgtgttggaattttatattttgagactcgtttagtagcaccggaaagattaaaaatccagttttctttattactgaatttaatatttactgatccaccgttaccattattagtgctaccattaaatgtcacggcacctgaaattgctttttcaggaaactgtgtcattattcgatcatcccacaaatgaattgcaccaccactgctgctaccaccataaagtagtgcttcggagcttttactaattgatatttcgttaattctattcatatcaacaggaataggcatattcccactaataaatgaaacatcattaatcggaagattattaactaaaatcccgactctattgccagagagacttcgaataacaggccttgccgcatttgggccaaaaccttccgcttgtacaccagcaacttttgaaacggtattaccaatcgtatttgtttttatttgttcaagttgttttccttttatctcttctcgattattgagtaataaagaggagaatgtctctttgttttttattgatgttgctttaacagtaataacatcgtttgatgtttctttttcttggcttttatcttgattattctcttttccatataaaggagacgacaaaagtataagtaaaataatagagagtttactttttttcatgatattcatattagaatgtaagagtagcgcctaagataatattacgaccaggtaaatacatttcatctttaatataagaggtgctgtctttcccttttacatcaaagatattattaatcttggcgtataaggtataatctgtgttatctaaataaccaatatattcactacctaaactaactgtgttataagcctctgtggatgtttcatagtctgctgttttattctgttttccaaaatgatcaatgcgaatttgtccaattacgttttctgtaaaactatgtttaatataagtacttaaacgataagccggtattcttggtatatttcccttattgtgtagtaaatttgctctaacataatcaccagaaataccaattaagctatcttggttatagtaataatcaatatttccttctatacctttaaactgtgcatcattttgaacatattgtaatgaacgatagccattatttaattcagtccccgtaaattgaccgtaaatataattattaatacggttataataggcactcatattgaattgaatatcacctgttactttagttattccaatatcaatattatttgcagcctctgcggttaaattaggatcgcctttttcaatagttcgacttgcagcatgaacaccattcgcgtaaagctcttctgcaacaggtaatcttttcgtgtgtgaaagtgataaatttaaaaaatagtcttgtgtaaaattccatgctaatccagcagaaatagaagatgcactctgcttattatttttttgagtttctctatttaacagtgattgccactcttggcgaaatcctaattcatagcgaaaatcacctaattggtattcttctaataaaaagagtgagtgattttttgtttttgttgacggtacataagcttcttctccttgagcactaaaatcacgctggttaaattgcccgccaataacaccatgccaaccccaaataggttgatgtgtaaatgtcagtcttaattcatcgcctttgtttttaaatgaggtactgacttcatttccttctttttcatcatgatgataatcggttctgaccgcactgaaacgtattgattcaataccagtaaatggattgtttttttcaccacgaagatcccatcgtttgctatccataacaatataaggaataccatgttgatgttgttcatcagggtattcatgattgtgattatgatgatgatggccgattaaaggagggcgaattggggcgtgatgatggtgatcatcttcatgatcatgaaaatgcgtatgaccaggcagcccatatcgacgatgttgttcaccataaccaatccctatataaccgtcatcaaaaagccaggatacaccaatatttgccgattggttatcttgataagatcctgctaaacggctagtttctccttgatgtaaaggttctggttgtttgtaatcactttgataacgtttagtaccctcaaggcgaagcgccaaattattttctcctaacgttaatcctactgatcctgtatttcctttagaaacagaatcgtattgataatgcaattcaccctcatagcctttttcaggcactgacataggaatcttgctatcaataacattaattgcaccgcctattgtgcctcctccataaagtaatgttgaagggccttttaatacttcaatgcgttgacttaaaaagggttcactggtgattgtatgatctgcaccaatagaggatacgtccataagatcactaccactgtgtaataccttgactcgattgcctgacattcctcgaataactggatgaactgagcctccaccaaaaaagctggcatgaaaacctggtaaggatgttaaggtttcagcaatcgaggcactacgattagcgcgtagatcttcttgtgtcagaacagaaacggggatcgccattttctcttgcggagtatgcaaaggtgttgaatagacctctaatacctcattgttccgattttcagttgattttattgcagggcttgcatttgcaaataaggaataactcattgaaataaaaaatgttgtataattaaaaatagattttttcatactatccgccattttttgttatgttataacatatcacattgtatgtatatataattatcattagcaagtgattatttaaaaaataataaaaatttgggctgtcctagataaggtttaagttttaactatctgttttagaatacttaattgcttctttgcagcttggcgtattaaacgggttattgttaaatctggtgtatggcaccatcagacaatgctccgatctgatgcttcatcctctgcatactggggttgacggtgtaagtatcccgcataattaatttgccaacgaaggagatcgctatgcgtaaagcctgttttactgagcatcagatcatcgccgtaattaagtcggttgaaaccgggcggactgttaaagttgatgactttaaccgtgagacattgtcgattaaaatcattctgaatctgccagatctgcgaatgatccgtgtactcgacaggatcgcggcaaactgcggctacccgatcatgctgcacatgaataatggtccagaatttatctcactgatactggctgaatgggcagaaaaacatgcagtaaaacgggatcttatccagccaggtaagccgacgcaggacactttcattgaatactttaaccggacataccgtacatacgcgatttttatatattcatgatcagacgtgagataaataacgaattggagtgggtttaaacaggttataacgaataggttactgtaattaattttcagtatatgtaagagaatttcgagtccgtttaccatgctgtgtaaacgcctttttcaaaagtgaccatcctggcggtcgcggtcaccgaactcgacaataaagcgactctattactatacgccagttcctcagcggcattgtccatttttgcgaggcaatccgtcagacagtgcggggttaggattgaagccacagagcaccgttatcactggatacaatggtacgttggctcaatctcaggctacgtgggtattgtactatggacgcttttgtcaatcagtaatggattatatagccagacatatcgatctgtaccttgctaaatgggttacccgtaaatacaagaggggacacggtagtctggttcaagcgtatgaatgattagacaggatccggaatgttaaactcagtttgtttgcacactggactatttgtacgcgatgttaccagtcaactacaagagccagatgacgggatactgccacgtccggctccgtgggagtggagggggaaagttcccctccacgacgcgataacctcatataatactagaaaataaaaatcagataaatgatagtgttcactactttttagtgatacaccttgcagaatgtaccattgcaacaaatcctgctgctatcatcatagtatctttcagaactaaccttcccgcaccggaaagataaggaaactcagtatgagcatctgctccatgtacccaggtttcaggtgtaaacaccaaaaatgttaatgtgacaaatggcgtaagaaacactaaggcagagccctttccatttattattaagataaacatcagcatagtactttcctgctggagttggatttccttgattgaaacgatgaatatctaacgtcgtcttcccttgagtatgctgtaaaaaactgggatcaaattcagcatattccatagccactgtgtccatggaaaaaactcccagtgaaataaatatggcaggcaggaatgaatgatgttcagtttaagtgcaatatttcataaatattatccttatttcagagctgactcacttaattcatgcccaccataatcgttaacaactgtccacttcacttttccatatcccgacatatttccatgtataggaaggcgtattgaagaataaggagcaaccatatctactggattaattgattgtgagtagttgctctgaatcaaagtaatatgattataagtaataaaataaggactttgattatctgcacaaagaaaggcctttgctccttgtttttcaatatgccatataacagaattataggcctcactgagagaacgtgtgagtttttctggacgatagaatagctttatgcgactatggatcgggagttgaagataatttgagtttacatttaaattatttttattttcaaatttaggtttagctgaaatatccagtatatttagccaaaaaattgattcacgatcattaggcagtgcttcacccgtatacataattcgtaatgtttgccctgtgtgaggttctatacgaaatataagcggagtaataataaagggaacattgactgagtctggagcaacactggcatcaccagtatcaatccaggactgaattaaagatggagtagattcatcattattaattttaatattaataccttcctagttttcaggataaataactcaggtacccaacattagcataacttgacacagaaaataagccggccatcatgaaaaagaaaagttttttcatggaaactccgaacaaagcagtgcagatgagctgccttgtaaataatgataataaaaacgcacgattattatttattactcataggcaatagtgtaattaacactagaaatgacatcccctacaattgcttttcctgtagcataatattgggccatatagcgtagtgtcgcttcatcgtcactattaatagcttctgaatggacatcctgtccgacaaagtctttccctaattgaatagcagtagtaccatcgttatttaataactgaatttgaacattttgtgctccgtcagagcttgcattttttagtttgttcgtattaaagtcagtattagctccgggttcaaaaaaagctttcacattactagatccattttgtccagtagtgcatccagtaagactaattgtaccgtcatatgccattgctgagttaaaaatagcaacagacagtaccgtacttaaagcaatattatttttaaatttcattatttggttactaacataaaaatcaatctataaacttcattgagggtatttatatccttaatttatatattaaaactataaaaaacaggtgctactctattaaaattattaaatataaacgccattatttaataaaaaattaataacattcaccaacatgaaaaatacggaagctttatttgaaattacaaacttattatttattaaaatgtaacctcatgtaattaaaatataattaatggatataattttctttctaaaaataaattatgttaatatgttattattgatcgataatgtatttttttgatagattaaaaccatcaatataaacataacaatcgtttttaacgatcatttttaacaatttatactgattgtaaaactcatttatattgatatagaagggaataggtaatacagaatatatttcaaagtatattttattaatcttaatgactatataagcaaatttaaaaaactttaaaataattatttagaaaataaatatatattaatgcaaccattaatgataataatttataatctttaattataggaaaggcaccataaatacattgtattaatatttataacatagacttggcgactatattaatcacctattcttttgttaaaaagaaaacaacaaataacaaaaaataaatatatgaattaaagaaaaatcattctttaaatgatataccttgatctgcatcacagtataattcggatatttaattacatataacttatagttgttatatataccttaacaattaatgaatgcaaaaatagaaaataataaccgattttgaccacatataaaacttattacacatataatgatgctttcacatttctcatgttttagttttaatcttttcagcgctcaaagataatctctctattggcttctatcacgtggtttgcatattttcatcaaatggatagtcaatctctttatcattatatatcacatttaatgtggttataacgagctcttattgaacattcatatccttggtttttatgcacagtaatgtgcagctaaacagcttttattcctagtcattttgctaaaaaaagattactaaaattataaaagccaccaacctataacattattttatatccgtgatgacataaatataaataaatgaaatattttcacttaatatttcagcaagattttttaccaaaaaggaattaaaaatgaaaaattataaagtcgcagtcagctatgatatgtctgactctatttcaactcatcgtaaatatgttaatattctacatactgacttctcttatattgccgcaattattatttcacttgataatattcaagatggaaggctcgattttattgaacaaaatagctttggacagcctgtattcgctattattaataaagataaagttattccgactaatattattaatcgattaacaggtgtaattgatttaaataaaaagaatacagaccggattcagccggctgttcccagactgaccgataatatctgaccataaagccgtttctaggctgcatccacttcccgctgaaacgccagctctttttctgcccaggcaaattcctgctgtacccacttttcagccagccgacagcgctcctcatctgaccgggcctcaatgcccagtgtcgtcagaggatccaggccgagagactgaataccgcgccaccctttcatcagcgcttcaaaacgggcatactcctccgcactcagtccccattcctgcgcctcatactgcaatgactgagtctgactcttagccgatttccccgcctcaatctgccaatctgccccccggaaacagactgtgtggctgtcagcggcgctgtcatcagacacccgctcagtaaaaccacaaatcttatgtttttcatcacggcatctcttttatggtaggcgcaacgtcaccgtacgcccctgataacgtccgcccaccggcagtaactgtaccagccccagctgatggataaaggtccggaagtaccggctgggcatgaccggtgttgaccagaatcgcggtatctatcagccaccggttcagcaggccgggagggtttatctgcacagccccccaacagcagtgaggtcagggcaagacatatcgggagaattttcatacgcattttctgtcctgtgttaataaaataaagtcacaggcacactgtgcgcagaaaagcaagtgctctcaatgagaaattagttttccgaaaaaaaaaagaaaacggcgggcataaaaaatgccggcagtcatgccggcatttgagagtaaaaacagaaaagattaatgttttaatgactcaatcttttcccgggtcagtccggtacattgcataataatgttcagatcaaccccctgttgtaataatgagcgggcgactttttcaacacccaggccaatacctttttcgatacctttttcgatacctttttcgatacctttttgctcaagttgttctgcaatcgttgtcagcatcgttttatactccggtgacagtgcaatgaattggctgaaaaagcgggattcatccagaatatacccctgataggcaatatattctatcacactcctcacctggtcaaccgtattgtgttgcgagttaattatctgcgcgattatcggcaataccgccattaaaccgtcgcgggtccgaatatgtttctgaaccagctccagcagggcaatacccttgtgtgtcaggatttcctcatcactgagcacactcaaatccactaacggaaacgaccgggtatacagctgctgagccagcgccggatcggcgaacccgtccagccagttcatgctgtacggataaggacaaacactgccctgataaaacagaaacggcaccaccaacggcagggtcttatccgccggcgattttttcagatgatgcgctatcgctgacatcgcataatgcatcagacgaaaacccattaaccgatccggttttgactggtgctcgatcaggcagtagatatacccttccccttccgtcatctgcacggaatacagcacatccgaatgcagctgacgtaaacggcgctccacaaaactggccggctccaggcgcagtgtacttaaatcgcacaaaggcaggatgttggccggcaaatgcaccgagaaaaaatcccgggcattctcaggatgcgttaaaaactgcttgaataacgcatcatgtaccggttgttgtgtatttttagtcacagcaaactccttattaatgactaaaaagaatcagccacatactctctggataccggctgttcagtctctggtggtgttgactggtgtttctcggctttatataccacttctttaccgattttaatccagtcaatattcagcagcctggctttcaggctgacccgctgttctccggcatgctcaccttttgtcagggtgaaaatatcggaagccaggttacttaatgtaaacccggttaggacttttttgtcctcatccaccgctttgatacaccgtctgaccagtgagaccgtattctccccgacaacggtcgtatcaaaacgaacatacacagggttatcagccggtccactgagtgcattaatcactgcggttaaaaactgccctttagggccgttaacctgacggatattcgataaatacccaatcccgttcacatgcagattaaagtatttattttcagatgttgtattatttttgctggtcatgatgtttctccatcggataaaaaaggtaaaaaaatgagaaacatcgtctcggcaggaacgtgtttcccaccggggtcagtaacaggaacgctcccgaactgacgacttgcgttgtataagatgatcctgatgataacgctattctgttatcaccctccgtcaatttcaaggacgaacggagttctgtcatcgcccgtaggctcccgtctcagatgacccgaggattggcagtggcaatcacccgtaggcgttcctctcagattgccggaacattggcatcgttgtcacccgtaggcgcttctctcagacaactgaagcattggcaatgttgcattaagcaacggtataagcagaataaggattaatctgctttttttatttgtcaagtaaaaaagcagttcagagagaaaaggataaacacagaagaataaaatggataacagaaacaaactgaaagtctggttacagcaacatcatctgacacaaaaagacctggctcaactcattcagcagacaacaggcaggccctgttctgtcagggcggtaaaatcctggttatgcccaccggaaaaaaacagcgcccggccctgcccggactgggtgattcaggtactcagtcacatggatgaataacttttttgtcaaataaaaaaggcgttacggttaataacgcctgacagtgccgcccactctgtgatgttaaaaagaacctcaggagttcaaccagctccggcgcggttttcatgaggttgatgcgccttaaagtctgtcctgctgacagacagactttctcattgtcgccaccgcagttgttccgctacggctttgccgcaatgacggggggcttttccctagcgtcagctatgctaacggtaattatcactcaggtaaagagtcctgttatgctcttcttcacggccttctttcttttattcatcccccgggtaaccccctgcattttttccggtaatggtacactccctttacaatccggataacgctgacaactccagaaacggcctttactgctctcccgtaagaccatctttccatgacacgacgggcaggatggcatcggtggcagatccagcgccagcggcatttccccgccttttttaatgagatgtgccaaccagctgatttgcttttgcataaacacatccagagacagatttccctgtgcaacctgctcgagtgattgttcccataacgccgtcattcccggatctgtacaggctgccggcagggcatcaatcagctgacaaccggtgtctgtcgcccggagtgtttttttctgcctgacaatcaatttcctgttttccagtgtggtgatgatccctgcccgggttgcctctgtccccagccccgcattctctttcaggactttttttaatgtcggatcggtaataaaggaggacgcattcttcatggccgcaatcaatgtaccatccgtatacggtttcggtggtgaggtcgccagttgtacaacctttgcctcctgtaccacacagaattcaccttcgtgaagggacggcaatgtttctgttccggcttccagcccggtttctgcctcttcttttactggcggatcgtcttcatgtttcacaaataatacagaccagcccttcactctttcgactttccctttggcaacaaattgttgtccgcctatatctaaaaacacctctgttgcatcccattcctgatccggcaaaaactgcgccagataatgggcacggataagtttatagacattcagttcagcctcattcatggcgttcaaatcaggtgtctgccgggtcggtataatcgcatggtgagccgtaatttttgcatcattccagacccgggaaattcgcgccggctgcaattgtgccagcacattctgtaaggccggatcgctttgtgataatgcatctaaaacaaccggtatgtcggcacgcatggacaccggcagatacccgcagtccgtccggggatacgtggtggccttatgtttttcatacagactttgcgcgatttcaagcactttatccgcagaatacccccaacgccttgaggccgcctgctgaagtgtcccgagatcaaacggcaacggcggcaaggcttttcctttcgtttcattcactgtacacaccgtcgctttccctgcctgccggcacagttgctctacggcctgagcggcctgaacgtgaatacaacgatgttcatcatcacaatactgcgaggcaggtcgccagtgagcctgaaaaatgatcccctgatgctgcaacgaggcggtcacccgccagaagggtttggaaacaaagtgcgtaatttctctttcccgccggacaatcagggccagtgtcggcgtctggacacgtccgaccgacaatatcccaccaaaccccagttcccgggctttgagggtaaacagacgcgtcatgttcataccgataagccagtctgctctggcccgccctaatcccgctgaatataaagaggccgttttctcgccgggtaacaggttatttaatgcctgcctgatactcgcctcatccagtgcagacaaccataaacgttgtacctttttccggtaatgacaggcctccagtaattcacgggcaatcacttccccttccctgtccgcatccgtggcaatcaccacttccgtcgcctgactgagcaactgttttatggtctgaaacaacgaaaccgcgtcttttttaaccaccattttccactgttcaggaataacgggtaaggcactctgccgccagggggccgcaaactgtgcgccataagcctccggttcagcctgctccagcagatgacctcttgcccaggcgacctgaacgccatttccctgaaaaaaattatcccgccgctgatgagcgccgatcacccgggcaatatctttggcctgagacggcttttcgcacagaaataatttcattaccctgttctacctcctttttccggctgcaacgtcattcgcggttttaaatatttcctgaacaaactccggagtcagggtatcactgtacgaagcgctgtaagtgatatacatgtgtgttcccgaaccatttttttccagttcgatgacgatatgtgccggcgggttacgttttcccatatccgcccccattttataataacttcccggcgtcacttcccattcccagccccggctttcttctgcaatagccgtggcggcccattgatcactttctttacctgactgacgcagagcacggattttggtattcacatcctcaaaaccataataacggcgcagacgggctgcggctgtatcaatatcaacagggataaccacgtcatactcccgttgttcccgtttctgcataccaccattcatggtatgactgacctgatgccccaggtcactgattttctgattccattctgcgatttcctgtgcagagcatccggtcaaaagccataaagaaaagcataaggtaagcaatccgctttttttcattgcagctccttattattaaataattaacccaatataaataacattcgttatttttttaaagacggtaaaaatgacgcacgttttcttcctgaaatgatatccggatcaatttcacctaaataacgggaagcctgttgataagtttcactgtttaaatcaaggttatgacgggtgagctcatatttccggtagtttacggccatccctgtcacatgacgaacctgatagcccgctaatttaaggaccttgtcacgttgctgacgggaaataaaaccataatgctctccctgcaatacacgcaaagcaagttgatcaaccccgacgagtaaccagacacatttataaccaacaggagatttactgaatatcgccaggtcaacaggagatgttgatgagatatccgaaataaccgcaaccgcaggtaactgaactaattgttgttcaacctctgaaagtaatttctgaatagtccgagtcccttgctccagtgcctgctcaagctgatacagccacatttctgcatataagtatcccttctttgcatcatcagtaatatgacccgcccgggaaataaacatcggaagactggggatcatccatttacgctttttttcgtcaccgtcattctgagagttgggtacaacccgcccttcccatagccggattgcataactggtatggagtttcagtgttaatgttgactttaaagggccagcctgaagtaactgttgagaatgtttattttgttccataacaatacccttgctttgagaaattgacataccgtacaaatgtcaaccccctatgccaacgataaattcaaattgaaaaaaataatttattataaaaacgtagcgttactcgtcatcctactgaaatgcaggttaacctttgagcattgtttccaccggaaacatcagtaaatagttaagggtcttcctctgttgtaaggggagtagtacagtacctaattgatttataaacaccatacaatgcatttatggtgtcttattttaaataagaggaaattcttcatgagtgtgccacaaacaaaagctgagctgcttttagctattgataaaagttttagtaaattaattagttacctcaacgcaatcccgccagaaatgacttcagataactcaatggatggacacgccaaaggaacgaagataagtgttcatgaccttgtttcatatctgcttggatggaatgctcttgttgtaaagtggatcacttttgatgctaaaggtctgcctgtcgattttccggaaactggctataaatggaatcaacttagtcttcttgctcaaaaattttactcagattacagtgagttaagttatgaattgttagtagctgaacttcaggctgtaaaaaatgaagttgtgaaacttattgatgagcgtaccgatgatattttgtatggaagactatggtacacaaaatggacgatggggagaatgatctcatttaacacatcttcgccttacgccaacgctaatggaagattaagaaagtgggcaaaaaacaataagatcagtttaaagtaaatatcagagtgaaattatatgtacgaaaatatctctatgcccatatcgttaaccagactgctccatagcttgttaaattctttactctcgatgatgcagatttcgttacggaaagcgaaatatcgcgttccggaccttcctacccggataagaaaaacccaatttttaaacactgtttccagtggaaacaccggttaagttttgagcactgtttccagtggaaacaccggttaagttttgagcactgtttccagtggaaacacgggtgatttattgaatacgccttcattgctcattggatatccctatgagcgtacggcgaaaacgctgaaggtactgacgtgcaatatcaggggcacccatccccccctgagacgccttacttctctccgttctctccggtttggtttgcgtgtgctgtgatacatccggagtacctgacattttctgtaaagacgcacttttcatccccgtttctgctggggaaacggagtgatatcgcccttcacgggctgcctttaatagctgcaaggcataccccaccggattacgtacacttcctgtcctcaccccctgtgtcagttgctgcacaatcgatattgcggcttcttccggcaacgcctgtaactgtttttccagcatctgccgatcattctcatcaatccactgatgcagcccctgcacctgagtacccgataaatattgctctccctgatctacgtacgtattttttacactctgtgtaaaagtattacgtacgtaacagttcgattttcgtacccctgaatcagactgggtttgtgtactcagttcgattttcgtacccggttttttttcatcatttttttccctgagttcgattttcaaatccggtgttttacactgggctcgattttttttatgtttacccggatgaagttgtgccgtctgcccattgagtatccggcgttgcctgtctgccagcgcttccggtgtctgaagactttcaagccgctgctcaatgagttgcattctggtatgctgatgtcgcattgacggctcggttttcagggcagtcagcgcagcgcgggccacgcaccgcacactcttatttttgtgataacaacttttttccagtacatccatccagcgtggatctaatgtctctgcatcaaatgcattcaccggctcatcatgtaacatatagatatttcctctgatacgcccccgtttatccctgacccgatggcataaactgagccagcccgtcagcctcagcattaacagtgccctgctgaccgtttcccgcgaggctttatcgctgtggggtgtggctaactggagttgtaagtcatcataggtcggaaatacggccccctcattttgctgagcatgaaggcggatcatcatccaggtcagtttatcaaccggggaaagtcgggattccagcaataattgccgggggattgcatcatgaacattgccggcgtaaatcaatccactgcgcagtgccgtgccgggctggctgtgttgccggtgatgcagttgctgccgcattttttctaatgaaaactgaataatactgtccggaggaaattgcatcttatgccccacacaaaaataatttcatgcctgaatacacttatagctgcctcctccggtgaaaataccgcaccgtaaagaggcagtctcaatatactgaggatcatgatgttgaatattctgcccttaccggctaatcatcttgttataacgttcatggctcatcagcttccagctttgcccctggtccatactgagcagacgccagaatgcaccaatatcaattttcaataccgggtaaacaccgcccttttttccaccgcatttcacttttttacaaagtcgttctcccgaaaaataacgtagcaataacccgtttgccttccgctgaatatgctccggaacaggcgtgacacattccggaaatatccgggcggattgatgatgactgatattcctgttatccggcatgatatttccccctgtcagctgaattcagtatgccgtcccggtgccattcctgaaccgaattccataccgtggtcagagagacattcattttttcggcacaggacaccatgatctgaagacaatccggatcatccggctccggcatgccctcctctttccagcgataccataattccgtttgctgcacatctgacagccgctgtgaacggccagcatttccccggatcccggacaaacgccgacgggctgacacctccagtgacgtcatgccaaaatactgattcagcaaatcgatggatgcccccagtctcagacagcgttcaatcatctgattttgacggtgaacttcttttgcccgggtcagtaataaccgtaaattctcccggtggatctggcaggtaataatggagaccggactttgagaaagataatgcagatcttcaatggttaaactgttcagtaaccggatctcattgtccgtcagtcccagcgcctcacaacgccgcagatttccgctttttatttccatcaccagttctgtcagcagatgattccctgcctgtgctaattgagtcgccattacagcctcctgtattattgaaagcctgccagagtgtaagtatccactgtaacacgtaattccggtgccataactcacgggctttatttgaaagcaatacttctgcccctgctttttgtctcatggtgcgcatatattttcgccacgcccggcgccggctctgataataccgggaccatataaatcccagtaattccgcagacaattcagcctgccggcctttaccggtaaaacacacctcaatataaggttctccggcggtcccggttttccgcagtgcataacggcaacggcaaatttccgcactgaacaacaccaaccgccaccagtccgcatcctgattttccggtggacggacagaaaaccggaaaaccttatcatgctcatatttccggctcccggcccggaataaccggcagatatccatcaggcgctgtatcacttcctgctcataaccggtctttgcccgcccccggttcaggggcagataacacgccagcgcctccggcgataaggcggtgcttttattcccattcctcttcatcattcacatccggatcaacatctctttgtttggcatacaaacaacgcaacaagtacatcagtttcatccatgtcataaactgggtatcattcaataccggcgacataccgggctgatatccccccgtcagcagggctctgagggcatccggaatatcatcatgggactcatcaggttctgagaaaaccgtcatcacacgccccagcaccgaatgtgctgacaacgtaataaatcccggagaatgcaccccggaagccgccataaaggcggaagataaatccagctcattccctaattcaaacaaagtacggtaaatttgcgtctgaagatgttcaatatcatccagatgtgatgccaccggccagagatcctgacacgtcagtgccgtcaccgcatgaccggagacgggcgcctccaccggtgtgacatgctccgggttattcgtgacaaacagacttccgccatcgacaggctcaatatccgcctcgtcggtatccccgctcagcacaggtgccccgccgtataaatccgtctggatctccacaaccggacgggattttttcttttcaacgacaggagatactgaagcctcctgacctgaaccagaagataggggctccgttaacaaatcctctgccgaaaaaccggaggtcataccggtaggtacggtttctgaatgcgcggttgttgtatcaccctcactctccaccggcgcaggcaattccggctttgtgctgcgtctgcctttattgaccttcaattcaaatacccaacgttcataatccacaccggcaacagaacactccctcagtagccggccaatcagttcatccagaaacacgtcataatcaaaaacatcatggttatctatttctgtgcatgtcctttcaaaacatcccagaaaatcacaggctggatccggcccgtcatactgaaaaagaaacgaatccgctacccgttttaatgtcgaacgcacggacaataattgctcaatttggggtcttcccagcccgttttccagtaaacggggcatataaggtaataaaacagaaacagtatcttccatcttactgatgtgtgaaatgctgacaggtaatccgtccgccgtcatgcgctgagcgaatgcccggagtgataattttttccccagcgtttcctcatacagagaacgcgccacacaaatcccttgtgctttttccagaaacgttaactcccctctgacttcattctccgccagatggccaatcaaacactgcaaacgccccggccagggtttaaataacacatgaaggcggaagaaacgctcatcctgtgtctcctgccacaactcagagaggatctgatagcgcgtatttccgccgtcactgaagatataaaactcactccccggtgctttggtgactttagggacactgtccagtccgcgtgcccgaatggaactcttgatttcctcataacgcgggtttctgccctgacgtgggttatccggatttggctgaagttgctcaagtgttaatatcatcggcatttcagacaccggattgacgtgggcattatcggataacggggaactgacaggatttcctctgagaagcgcctgactgagtttatgctgtaaatctgttttcattcttcgcctctcccttaaaaataatatccctgaggaaaatcactgaaccgggtatacatcccgttaaactgcactttcaccgtccccagcggtccctgtcgttgcttaccgatgataatttctgccacacctttgtccggtgagtgttcgtgatacacctcatcgcggtacaaaaataaaatcaaatccgcatcctgttccagcgagccggaatcccgtaaatccccgtttgtcgggcgcttatctgcacgttgctccagttgccggtttagctgggaaagggccaccaccggacacccgagttctttcgccagtgctttcagactacgggaaatttcactgatttcctgcgtccggttttcctgttcaggactgcgcatcagttgaaggtaatccacaataatcagtcccggcgtacccactttacggcggtaacgccgtgcccgggcacgtaacagggaaggtgtcatattactggtatcatcaatcaccagacgctccccccattcggcaatctgtgacatggcaccaccaagacactcccagtcattttcttccagagacgcactgcggatagccgtcagtgagacattgcccaaatcactgagtaagcgctgcatgatttgttccgccggcatttccagactgaaaaaaaagaccggtttttctgccagacgcagggcattctgtgcaacggtcagcgccagtgccgttttccccatcgatggccgtgcgcccagtaacaccaaatcgcctgcctgcaaaccacaggttttttcatccagctcactgaaccccgttggcgtaccggttatcccttttgcacttaatgcctcctccagatgctgaacaacattatttaaaatatcgagcaacgacggggaataagcgggcagccctttttctgacagctgaaacagccgctgttcagcctgctcacataacgccggtatatttgcctgagccgccacactctgggtggccagcagattcccgagcatcatcagaccacgggcacggctgcgatccacgacaatctccgcatagcggacaatattggccgcactgggggtgtttttggataattccgccagataagcaaagccccccacccgctcaagcacgccgtctttttccagtacatcactgagggtgattaaatctatcgggctgtttatctgacacagggcggccattttcttccagatttcctgatgcgctctggaacaaaaatcctccgcctgtaataacggcgccacttcatcccagcggtcattatccagcatcagcccgcccagcacgctctgctccgcctccggtgagtacagagtttcaggtaatacagcagaagaagactttttatgcattgaaaagccctccgttaatccgaaatgccctgttcccaccgtgtaaataaattattttttttggaatatgaattgttggtgtcggacgaacagtcgtcagagataagctccctgtgactgcccgactattttcggaccggtaagtttggcgaccccggtctgaacgtacaggcagcctatttttatccataacacacctaaaggaacatttatgaatacaaactatcaactgccgtccgacattgattacattggcatttttgacaacaacaccgatacgggcgaagcccgttttgacttgtatgtcaaaaccttccggagtatgaccatgaaaatgactgaagaaagcaattcccgccagagtctgttccgcctgcaatggctgggtgactggctggctgaaatgtatggctggaaaatgctgaatcccgatatcactcccctgaatgctattcacagctatcttattcttcgcgataacctgccggcagctcaggtggcaggcatgacaacagaacagatacatctggcgctgactgaagagtggggcacattcaaagctcgtagaggggcaaaagactttttgcgcagagtcgaaaaacgcccggactctcttgacgatcctttccgggaaatacattaattctgatcgggctggcagtatctgctgccagtccacggttagactgaacgggaaaaaacaggagaataccttgatattcatggacgcacctcccgtttcagcacatcatcaaaacgggttttccattccggaaacagctctgaaacaagatgatgcataatgactgcggctgccggtgttttacgctgagtccggtattccagacgatgcaccggttgtccctgtgcatgaccatttttaaatatttccagtttgggaacagcggttttcagtaacgaaagagaaatcgactccgcaaaggggtacgctttttggtcaataatctgagttaattcagtcagtgttgcacgatctaacaccgtatcttcaacacaattagcaagaatacgtattgccggcaggggaattccgtaagccgtcagcggcaccagcccgccgattaatcccagtgttccccgtaaaaattcacgcgtatccggcaaaataggtttgattatcccgacagcataatcggtggcagctaacaaaatggtttccagcatcaccgaagccgcgccttttgaatcaatgataataacatcgtaagaagcgaataacggatgttgcagaatattacgcagacgcattctgccgtcaggtgcatgcaatatagccgcagggagacgatcatgcggatcgttagaaatgatgatatccagattagggataacggagcgtgatatgatggtatccggccgggaaagatcggtcagttgcattaacaactcaaacaagccgtttggtgcttcatattcaagtttaaacagactgctggctgtcggctgggaatgatcgccgtcgatcaacagggtttttaaccctgcatcagcacaaaaacccgcaatattgctggctttggttgactttccggctccgccttttgttgatataattggaacaattctggtcattttctcactcagcatactctgggtgagaagtcaaaaaaaataattacattagtgaattacatcaagctttttaactaggggattgaaaatccccgtgtccttggttcgattccgagtccgggcaccatattttatttgttcgtcagtgagttaagtcactgagagggcaaaaaagagttgaaaaataatataatttggcacagtcactttatgttaaaactcttaaactaaacagtcttgctcatatcaaggctgtttttttatttgtcacttttactttctttcctaattgctgtcaaatctagatactcctcctgttattcttatcacatcaattccgcttcaagtatatctcgcaagttatcaacactttcatcaatgtattctaatatcgatgtaatactggcatgccctaatagccttttcacaacatgcagattacgctctggtgattgcatcataagataaaaatagcgacatattcctctaccaactccctgaagcacccccaccaccactcgaaccaccgccgccaccgctagaagaactagaagagctggatgaacttgatgaacttgatgaataagacgaactcgaataaccaccagagcctgaataaccactacgtctacgaatacgttttgaatatggcagttgattaaacggtgaaccaaacggactagcgacacaaatcgctttccattcttttcgttgttgccgataaattggaaataacaggttgataataccaaataaaaccactaatacgataaaattacataataatgacaatatgactattatcactaaaacaaaattatcaataataccatcaagaaagacttgtgtataaaacatcgccgccgcaaaacagagtgtcatggggaaaaataacgttgaaaatgtaggaaaatagtacgaatattgcagataatttttcaactgtttacgttgctttatacttaacttacctttttggtctgctggatttttcttttttcttcctctaggcgctaataattgattaattttggtttttatttttcgcgtcgagaatatcaactgaaaccaataaacaccgcctaatattaccaaataaattaggataaaatgtgtgtggaatattttaagtgtattagtatttatctgtgagttagtgaaacttattggttcatgattaacggcttgaatagcatttttaaccccttgttcgatgcctgcataataattatttgaacgaaaaaatggcaacatttcattgcgaataattcgtcctgccagtacatcagttaatgctccctcatagccatacccgacttcaaaacgaacattacgatcattaattgccaccacgagcaataatccattatctttcccttttctgcctatcttccattgattaaaaacacgaaaagcaaaggattcgatggtttctttccctgtcgttggaacgatatagacaacaaattgtgatccatcattacgactattttcgaagttaaccaataaagtatttaacgctttgaattgttgtgcagtcaataaatttgcactatcaatcactctatctgtttttagttgaggaatatcattcgctgatgcactcactatcacgctaaagctaaataagaacaatgagaataagaataaaaccttacgtatcatgaggcaaagtccaccactggtgttacttttatttcctgttcactctcaacagtgaaattgacttttttatcatatcccataacgatagctatgaagttataaggaaactgtctaatctgagtattataatgacgaactgcctcgatatatcgccctctagcaacagagatacgattttcggctccctctaattgcaccattagatcttgatataatgtgttagctttcaagtcaggatatctttctgaaatagctaaaagacgtgataaagattttcccaaatcatcctgtgctttttgataactggtagcaagtgtagaattttcaaataaacgcgtattgacattaatttgtccaacagacgctcttgcctttacaacatcttgtaatacttggctttcataatttgagtaccctttaactgtattgactagattagggatcaaatctaaacgacgttgatattgatttaataattctgatgccgccgcagtaactaactcgtcattcttctggattttattataagaattaatcaatacaacaaaaataatgataagaagcaaaaccaaaccaacgactaacttacgcataaaatatccttttattggtgagcttttagttctatgacagcaataaatttatcatttttatcaactaaaaaaaatcatttaatattattacccattttttattatggttactatttttagtcgatcttttcttcagtatttttcaacaatactcctatcttcttaatgaaatagaatattcactcaatatatttattttttgcacaacaaaataattattaccttaagataaggtattgccatcagagtaaaatcacttttatcttttttaaagaatgatctgattttctaatacagaagaattaatactatctcattgctatctcagtcatttatcttaactaccaatgaacataaaaataaattaagatagacaaaatgtgttctcaaccacatgtttttgcaaccatttaacatagtattattagtattaacctaaaagagacacgctcatctcgttaatttaagagaacgctttatgaacctttttttccaaaatagcttagcctttcctagcattatctttagtgccttacttattattatcctcttttattggctatgtgctgcttttggactattagatatcgatttatttaatatcgatagcgaattagatgtcgatgcgacgggccttgcgggttggctaactaaattagggcttgccggcattccggtaaccattatattaaccttcttcactttgttcggctggtttattagttacttttgcgtacattggtttattcgttttattgaaacagatttattgcgttatgttatcggctttattgcttttattatcatcagctttgtttctcttaatttaacagcgctatgcttaaaaccaatccgcaataagctcatttctcgtagcaaacctaaatcagttcaccaactagtaggaaaatttgctgtagtacgctccgaatatgtcacagaaaataaaggtgaagccctattagaagatggtggtgccggtttaattttacagatcagagcgccagcaacagaaaatattaaacgaggggatagcgtaattattattagttatgacgcgcctactcatagttatcaagtcgtaacggaagatgaatttcaccgctaatgataaattcggtgaaaggaaaataagttaacagacacattaagattaaaaatgacgacatcgtctgaacctatggagaaaaatgtatggatttggctttcgttatgcctttcttaacaattattggctgtgtgatcttagttattttaggactctttggtttattcaaagcgttttatattaaggttccacaaggtacagcattaattgttaacgacatgacatcacaacctaaagttcattttactggggctttagtttatccggttatctacaaaaaagagtttatgcgtatttcgcttttaaccttagaagtcgatcgccgtggtaaagatggattaatttgccaagataatttacgtgcagatattactgtcgccttctacctgcgtgttaatgaaacgacggaagatgtattaaaagtcgctaaagcgattggtgtagatagagcatcagatcatcaagccgtgagtacattatttagtgctaaattctctgaagccttaaaaaccgtcggcaaacaatttgagttatcgaaattatttgaagatagacaaaatttccgtgatcgtattgttgatgtgattggtaaagatctcaatggttatgcgttagaagatgtggccatcgactatttagagcaaacacctaaatcagcccttgatccaaataatatttttgattcagaaggtattcgcaaaattaccgaaattactgcaatacataatatcgaaacgaatcaaaaagagcgtgaccaagagttagcgattcaaaagaaaaatgttgaaactcgcgaagcaagtctggctttagagcgccaacaagcagatgcagaagctcgccaacagcgtgaaattgataatatccgtgcccgtgaaagttcagaaaccttacgagtacaagaagaagagcgtctaaaagcagagcaagctcgtattcaaactcagcaagaaattgaaatacgagaagaaaaccgtatgcgtgaagtcgaagtcgcgcaacaaaaccgcaccagagcggtagctatcgagcaagagcgtgttaatcgtgcccgtgaattagaaattgtcgctcgtgagcgagaagttgaactacaacgtattgaaaaagaaaaagcgttagaagaagagcgcaaaaatatttcaaatgtgatccgcgagcgtgttgctgttgaaaaaacggtcgcacaagaagaagagcgaattaaagaagtacgtgaagtctcagaagctgagcgtatgcgccaagtgacggtgattaatgcgcaagctgaagccgaagaatctttagtacgccaagtgaaaaaagccgaagcggatgaatcaagtgcaaaacataaagctgaagaaatcagcaccatggcaaaagcagaattagaagcctctgtgaaacaagctgaagcgaaaaaacgcttagctgaagggatcgaagctgaacacgcagcattaggccttgccgaagcacgtgttcgtcaagcaactgccgaagcagaagaaaaagaaggtttagtacaagccaatatcacagcggaacagctgttggcacaagcgcgtggcttgaaagaaaaaggcttaagcgaagcgcaagtcatggaagcaaaagcacaagcgcaacaacaacaaggttttgctgaagcgaaaattcttgaagagaaattagcagctcaagctcgcggtgaagagcaacaagcgaatgctaaagaaaaactgggtcttgctgatgcgaaaattcttgaagaaaaactggccgctcaagcgcgtggtgagggtcaattaggttcagcacaagcagaagtgatccgccaacgtctgaaagcagaagctgacggtttaacagataaattcaagtcaatggatcacctcagtgatactgctcgtgctcatgaagagttccgtatgcgccttgaaaaacaatttgaacaagccatggcttctattgaagcaaataaagagattgctcgtgagcaagcggatgtattagcagcagcactgagcaaaacgaatattgaaattgtcggtggtgatggcaacttctttaataccttctctaaagcactgagcttaggtaaagcggttgatggttttatggataaaagtagctttgccaaagagaacgttgagaaattgattaatcgtactcagcaagataaaaaattagatgttgcttcactgctaaaaaatccagaagttcaagaattaattaatggatttatggcgactaaaggtgcgggtcaactgatcaaagaagtcacagcaaaatcagacaccccaaaagaagattaatatcgctctaaaaggagaggaaaagacatagataaattctctatgtcttttcgattgtttctatcgtttaagccaaggaaatccgttataccatgtctgatattcatgatacgaatcgcgaacaggaaatacttgatagcgctgttgcacaaggtggcgcatatgaaatattgcgtaaacgccttaccgagcaaggtcagcagttacatgtaaaagccactgaactcaatcagcatcgattagctgaatttggtcaaagccaaatggatatcattggccgtattcgtattcgaacagagaataattgccaagcaagagatattgttcgcgttggtgaatggttactatttggttataacgttttcctcggtttaaaacgagaaacgcatcttgaagatgttttttcactttatcgcttaattgataatgatggcgagtttgatgttgaagcggttgcttatgaaggcacttttttaaatgataatcgctttatccaagattttaccgagctatacacttactataaaaatacgcaactactacagctagttgagcgtgatggtaaattactcgctagttttcaaattggcgatcgtattaccgatgtacgcgtcttccgttggtcgatatccagtgacaaacaacgtattgaatatattgataatcgtggcgaacgcgatatagcactcccccctgcttacgattttgattggataaaaacacaacgtgaagatacggtaaatgggcgttttcctcatatcaacattttagatacagtctttgtagaaaccactggtggcgatctgactgtcaaatgtgaaaacaataccgaagatggtttaggaatttatcgtgaagcggtcttagataaaaaccagtcccttgatgatgcacaaattgaatatgcacaaactggcagtttaattttattaaaagtgcttccttaccgcgaagagaattggcgttatttagtctataacacactaacacaaagtgttcagcgtattgatgccattgggcaagcttgtgtgcaacttccggaagatcacggtatcattttccctggtggctactatctacaaaatggcgattacaaaacctttgatcaaccaatggaaggtatgtattttcgtcgtttacgtcgttcacctaacggcgaagatgtgctgtatgtcttctattcaccgacacaaggtcgtctcgcgctatttaattacaatatgattgagcgtaaattggcgacaccattggtcggtcatggctatgccatgctagaagatggcaaaatggtgctatttgaaggggaaggcgaagaagctacccgtgttcacccgatgcaagtttggcaaacgcccttctattctgaagaatttgccgataaacaaccgccacgaaacggcttttatgggcgtattggtaatgccgatttagttcgcgggatctcagaaattttacatgtcgccaaagaaattgaaggtagccaagtttccatcgctcgttatgagcaacttagccaacaaccaaaaagcttattagatctctattactggtttaatgatgaacactgtctaggtattggccccttactaaaagagatcgctcaaacaagtgaattagtgcttgatgaatatgaaaaagtcgaaagtattcgtcaacaatcagcgaaatcaatgcaagaagcgatcaaccgtcagaaatctctgttatcactgacactgcctgatagttggaccgatattcaacaatttgttgatagtttaaattcgctcaatacacaccatggacaccttatttctttgcgtgaattccgttatatggatttaacgcaattaaataaaatggaaacggaaataaccgaggcacagcaacgtgtttcgcaagccacagcccaatttcttgccagcgacaaagcgctacagccttttaaaacacagcttactacttttgaacaacagatagaaaaagcacaaaacagtgctcagcttgatgtaccaatgaatgagatggcgcagatgtcagaagatttagacatgctgtcaaatctgatggcatcacttacctttgaggatgtgacgcaacaaacacagattattgatgccatctcccaaatttatgcacaactcaatcaatcacgagctcgcttacagcaaaaaagaaaatcacaaagtagcgtagaaaccgtcgctcaatttggtgcgcaattccgcctatttagtcaggggatcaccaatgctttatcactggcaacagatccggaacgttgtgaagagcagctttcacgactgctagtacagctagaagaattagaaagccaatttagtcagcatgatgaatttcttgatgatatcttgtcaaaacgtgaagagttattagagacttttgaggcgcataaacaatcgttacttgatgatcgtcaacgtcgttcacaaagcttattaactgctgctaatcgtctcttagaaaatctgcaacgtagaacaactcggttgcaatcacaagatgaattaaatgctttttttgcctctgatcctttagcattaaaaacacgtgaaatcattgaaaaactaagagaaatcaatgacaacgttaaagcagatgatattgatgcccgtcttaaatcgtctcgtgatcaagccatccgtatcttacgtgataaaacggatatctttgaagagggtggcaatgttattaaattgggccctcatcaccgttttagtgttaatacacaagagctagatcttactattttaccgaaagaagataagctttggttatatctaaccggtaccgatttccaagagccaatcgaccatccagagcttgaaacactgcgcccttactggaatgcgacattaagttcagaatctgaaacggtgtatcgtgcggaatatctcgcctattcaattatctatgctgcatcaaaacgtcaagatggattaaccctagaaatcttaaaagaagcactgagtgtacctgaaaaattagaaaagttagtacgtgatttcgcaacacctcgctataaagaaggctatgaaaaagggatccacgatcatgatgctatcgccattctaaagaaacttctacctgtaggtgaaagtgctgatctgcttcgttataacccaacagcacgggcaattgctgctattttctgggaaaaagtacaaactaatgaatacccagcattatggccagagcgcgcacgaacggcagtgaatattcaacaactgtttcataatgatgatgcattaattgatttacaggcagaaatagaagcggatatccgcctattccttactgataatccgattaaatgtggatcttatgttccgatccaagccgctgaatatttaagttttgcactagcaagaacaccaatagaattggtttacagtaaatatgccaaagagctcgttgttgccttacaaaaccgattagaagccgctcatatgtggattgattttaatcgttcacaacaaaatttagcctcacgttatgcacaacgttgggcattgatccaaaattggctacaaggattgtgctctcaagccgattatgctcatctaaccccttatattccgggggcaattgccattattatgttagataaaatcgcctctgcacgttatagcgaggttgatttatactttaaggtaaacggattattaggtgagcatcctactattgaaaatcaaacactttcattgagtttagatgattatttcagtcgtatgcgcggacagcgtaaaacctttattcccgcctttaatcattatctgactttacgacaaaaaattgttcttgaagagcgtcagcgtttaaaactggatgagtttaaagcaaaacctctcagttcatttgtgcgtaataaactaattaacgatgtctatttgccaattattggtgacaatatggcaaaacagattggtgcattaggtgaagggaaacgcactgacttgatgggattattattaatgatctccccaccaggttacggtaaaacgaccttaatggaatatgtagccgatcgtttgggactgatctttatgaaaataaatggccctgctttaggtcataatgttttgtcattagatcccgaacaagcgccaaacgcaacagcaaaacaagagctagaaaaactcaatcttgcccttgagatgggcaataatgtgatgttgtatgtcgatgatattcagcatacacaccctgaattcctacaaaaatttatctcgctatgtgatggcacacgccgtattgaaggggtttggaaagggaaaacccgaacctatgatatgcgtggtaaaaaattctgtgtggtgatggccggtaacccttataccgagtctggtgaactatttaagatccccgatatgttagctaaccgtgctgatatctataatcttggtgaggtattaggaggaatggatgacgcctttgcactcagttatattgaaaatagcttaacctctaactcagttcttgctccccttgctttacgtgatctaaacgatctctatctttttgttgataaagccatgggtaaatcagtttcaaccaattccctcagttatccttattcggatgcggaaattaatgaaattgtgatggtattaaaacatctaattactttgcgtgatgtgattttaaaagtaaatcaacaatatatagcaagtgcggcacaatccgataaatatcgtactgagcctgcattccgcttacaaggcagttatcgcaatatgaacaaattaagcgaaaaagtctctgcggttatgaatgagaaagaaattgaacgcttactcgacgatcactatcttggcgaagcccaattactcacaacgggtgctgaagagaacttattaaaactggcggaaatacgtggcacattaaccgaacaagatgctattcgttggcagcaaatcaaaaaagattttatgcgcaacaaagcattaggtggcgataatgctgatattggcgatcgcgtagtgtcacagttggcgaatttagtagaaagtgtgcagagtttacgctaaaagagataaattaaccttatttagttcacttattttagtgggctaaatagggtatagataatggtttataaattgagcaacccactccaaaaatcattgattaattgaaatactacaacccatgtacaatccttactaacaatctttctcatgtttccatgttcacgatatgcatctgttcaagattagtgaacaagggaatatcgtgaacagaatatggttaaatattttacaattaaagggattttttaccacgtcgcataggcatcgttgatgtctgctttaacgttaatcccttcgtttctggtgcaaacagtactgataccatcatcccaaacagagaaatagccgcccccaccagcattgtggtattgatcccataagtggcaataaaagcgggaagcgcacaggtggaaataaccgtcccaatacggcttatcgacataataacccccaccgccgatgctcggatatcggttggaaataattcattcggataaagccactgtaaaatgccaggtcctcccgagaaaaaagcgtaggtagcaaacgctaagataacgaataaaatcggtaaattcgggaatatccccagcgtgaataatgctaaagtcatcatcgcaaaactaccaattaacagtgggcgccgccccgtttggtttaaccaaaacatcgcaggaatacaacccaacataaaaaataggctgatcacgacattgcctaatgccgcacttcttcctgtatcccatcctaataaaccgacaatttgagggccaaaggtataaatggcaaacatcgggatcacttggcaggtccaaattacggcaacaaagagcacaaatgagaagtggcgtttattaaataattcgataaaacgggtcgttttagcatcttctgcttcaaagaccacaggctcgccaaagagtttgatcatcatttcattacactctttaatacgcccttggcgtattaaccaaagcggtgattcagggagatcaaagcgaccaattagaataataacgcaaggaataaaagcactgcctaacatccaacgccagccatcttggacatcatataaaagataacccactaaattggcacatgtcgcaccgatataccacatagcagcaataaatccaacggcaaaggcacgttgctttttattggaaaattcggtgatcatcgaagttgcaataggatagtcagcgccaatcacaatcccaataaggaagcgcatcactaacaaccctattggtgttgaaacaaacatggtcgcaatagaaatcaccgcaatagccacaatatcaacgaggaacattttacggcgccctactttgtcacaaatatagccaaaaagtgaggtaccaataaaaagccctgctaatgttgccgcaccaagcaaaccaatccatcgcgtatcaagctgtaatataggtgttaattgttcgagcgccacaccaataatgactaatacataaccatcaagaaaagggccgccacttccccataacatcactcgacgatgtactgaggtaaaacgaatatcatcaaagtttctgggctgcatgactgcgtcctagtctatttttttaaccaaagaaagaaaagctcccaggccggagacagcgctgggagaaaagtagcgatacatcatccgtaacgatattccacgccaaacgttccgcgtgggtattcccatttttcaagcgcactgtctaaaccgagaattcgacaggttccacactctaagcaccctgcataatcaaagctgacgctaccatcttgttgttttttataaagacccgcaggacaagcttttaccagtgtgtctaatacttgcatatcaggttgctgtttaatgatgatatgtggattttcttcatcgacattaaatttattgatgcccaatttgacatcgacatttacaggagaactcatattgcttttactcctttgatcccatcttttattaaattcatccaccccacttttttgctatgacgcatgatggttttacgcatcggtacaggggcatcatcggtgacagtaaagagatcttttgcaataccaaccaccatgtcaggataagcagtaaacatacgcggattatctagtaaatcaggcatacgttgatatgctttcatatcgcgcaaaggcccctgtgctaaatggtcgagatactcattaagagtttgtttactaaaatcattttttgccattgctgaaagcaccgtttttgcagcagcttcccctgatgccatggctaaatccatccctctaatggtaaagcctagattcatacacatgcctgccgcatctcctgctatcaaaacaccatcgcgaacaagttcgtgttgcattcgcaaacctgcctcgggtaccacatgggcgctatattccaccatttttccatcagcaattagcggtgctacaacgggatgttgtttaaaatcttctagcatttgtggaaccgattttttggcatctttaatatggtgaagcccacagacaagccccaaagaaagcgtcgttttattggtatataaaaaaccgccccccattaacccatcggtaggagagccggcaaataaccaagctacaccttcgttatcttttaggttaaaacgatctttaatgacactttcaggcagttcaatgatctcttttacgcccacggcaacattttcagctgcaactcgtttagtcatgcctaactgttcagccaaaagtgagttcacaccatcagccaaaatcaccgctttggcttctaatacatcaccatctgcttctacaccgacaattttaccgtcacgctcaactaacttatcaacacgaatgcccgtgatacactgggcgcctgcatcttcggcttgcgccattagccattgatcaaattcaccacgtaatacagaccaagaggcatgattagggttatgcgtttcaacgttttgatagtcgatagtcatagcccctgtttgtgtcataaatgacagtttttcatgggtgatcacccgctcaaccggagcctgttgcgcaaattcaggaatgatgcgctcaagggtatgggcatatagacgaccacccgttacattttttccgccggcgtagttccctctttctattagcaatacctgcgcaccttctctggctaaaacaagtgcagccacagagcccgctaatcctgcgccaacaataatggcatcgaaaatatcttcggaatcggacataacatctccagaacttgcaaataaagcagagaagttatcttctctgctgactaaatcagttagatagttgacgggtaagtgcaggcaaaatcttcattaaatcaccgacaatgccatagtcagcaaattggaagataggtgcatttttatctttgttgatcgccataatggtttgtgatccatttgcaccaaccatatgttggatttgccctgaaatacctaccgccaaatacagatctggcttaagcatcaagttagaaatgccaacataacgctcatgctccatccatttttcattttcagccacagggcgagagcaggcgatttcagccccaatctcttttgctaactcttctgcaatagcaatattttctttactgccaatacctcgaccaacactgaccacaaaacgggctttatccagatcgacggcattgatttttcttggctgaattgactggcaaataatgctttgtgaaggggcaatccatgctactttttgtgccgtacccgtagcctgtgtttctgatgcaacgtcaaaagcaccagtacttgcggtaacaacacaataaggtgttgttaatgtttcatcactaaaggcaagtccaccgtaaaccatatgttttgccactaatgtatcattttgagtacttaatgattgtgcatcatttgatactaccgcggctaaacggtgacctaaacgagcggcaaataatttgccacgacgcgtattcggcagtaagaccaagccggcatcgctatgtgatttaatggtttcaacgatactttgtgcataatcttccataatgcgatcatcaggtttaccttctaattggaaaaccgctgtcgcccctaatttaaaggcagcgatgctttgctcatcattaaaggtaaagacattgattgattgacctaatgaagaagccccccccattaattctggtaaaggagaaagtacatcactcaacacccaaacagttgaaaactggctcataactccccctattacttaataatttttcgtaaatattctgcaaattcagcaatttgatcatcgccatcaccttcaataatgatgcgctgacgtactttttgtttcggtgctaacacggtttgctctgaacgtggcgttatgggctctaaaccaagatcggccacactccattgttgaaccggctttttagcggcacctaaaatggctttcatggatggaatttgcggagagttgatatcggtagaaacggcaatcaccgcaggtaaggtgatagtaagcgtttcaatttcgttttctaattcgcgttcaacggtgatggaatcagttgtaatagaaacaattttattaaccccattaatggcaggaatattcaagatctcccccaccagcaaactcacttgttgggaacttagatctgccgagccatcaccacataagataagatcgtacccctgcttagttgcagctgctgcaagcactgtcgccgtttgataaggaagagaagcttccaattgctcatcgaccaccaccacgagatcatcagcaccacgagataacacatctttacgtgctttagcgttagtcagcgcgttaccacctacgctcattgccgtgatttgaataccatcaagttgtgtttttaactgatttgccgcttcaatcgcatttaaatcatattggctaattttgttattggcgcgcgaaaaatcgagtgaaccatcggcattattgaccacaatatcctgttcatcgggaacactcttgtaacatgtaataatcttcattacatctcctgaaattaataaatatgtcatttactctggcaatgtaatatacaattaacacaattaaatgattaagaaattaaatctagatcaccaatattgaagattattaaataagagatggatagcgttcaatattgctaaatacatcaccaatattgaaattaaatttaattaaagtgattaactttcaatattgttatctggatcaacaatattgaacataataagaaatgagctatttaatattcaatattgccacaaagatcaacaatattgaaagagcgaatataacacatttattacaaacctaaatatatccttatttatcaattaattaaaatgaaaataaaaggttataaaccgtaacataaaatcgacaaaaagaatagtgtgaagtgaataacagaatgaaacattaataatacccattattcttcttcattaatgattttataaattagccaatcggcttgttttttgattatgataaaaaccaattaatggaatatataggatctaactaatagagtttattcgaaattaggaattaacacttattaaacttctgcgctaaatatatttggaaaatttacctatgagcaaagataataaaaaggcaggaatagaaccgaaggttttttttccgccattaatcattgttggtattttatgctggttaacggtacgcgatcttgatgcttcaaatgaagtgatcaatgccgttttcagctatgttaccaatgtctggggttgggccttcgaatggtatatggtgatcatgttcgggggctggttctggttggtttttggacgttatgccaaaaaacgccttggcgatgagaaaccagaatttagtacggcaagctggatctttatgatgtttgcttcttgtacatcagcagctgtgctgttttggggctcaattgaaatatactactacatttcaagtcctcctttcggtatggaaggttactccgcaccagccaaagagatagggttagcttacagcttattccactggggcccgctaccttgggcaacctatagtttcctgtctgtcgccttcgcttacttcttttttgtgcgcaaaatggaagtgatccgcccaagtagcactttaacgccattagtgggtgaaaaacacgttaatggtttatttggtactgtcgtcgacaatttctatttggtcgccttgatcctagcaatgggcaccagccttgggcttgcaacgcctttggtaactgaatgtattcaatacttatttggtattcctcacactctacaattagatgccattattatctcttgctggatcttactcaacgctatttgcgtggcatttggtctacaaaaaggggtaaaaatcgccagtgatgtgcgtacttacctgagcttcttaatgttaggttgggtatttatcgtgggtggtgccagctttattgtcaattacttcacagattctgtgggtacattgctgatgtatatgccacgtatgttgttttacaccgatcctattggtaaagggggttttcctcaagcttggactgtcttctattgggcttggtgggttatttacgccattcaaatgagtatcttcttagcgcgtatttctaaaggtcgtactgttcgtgaattatgtttaggaatggtatcaggtttaaccgcaggaacttggctgatttggactattctggggggtaacactttacaactgattgaccaaaatatccttaatattccgcaactgattgatcaatatggtgtgccacgcgccattatcgaaacatgggccgctttacccctcagtacagcaaccatgtggggcttctttattctctgctttatcgccaccgtcactttaatcaatgcctgctcttacacactagcaatgtcaacttgtcgctccatgaaagaaggggctgaaccaccattattggtacgcatcggctggtctgtattagtcggtattatcggcattattttactagcattaggcggcttaaaaccgatccaaaccgccattattgccggaggatgcccactatttttcgtcaatatcatggtcaccttgtcctttataaaagatgccaaagtgcactggaaagattgctctccctatacgcaaaaaatgacacattaagaggttattaacatggattttagattgaatgatgagcaggaactgtttgttgacggtgtccgcgaattaatggccagtgaaaactgggaagcttatttcgcacagtgtgatcgcgaaagtaaatacccagagcgttttgttaaggccttagcggatatggaaattgacaatctgcttatccctgaagagcacggtggcttaaatgccggatttgttactgttgccgcaatttggatggaattaggtcgtttaggtgcgccaacctatgtgctctatcaattaccggggggatttaacaccgtattgcgtgaagggactcaagaacaaatcgacaaaatcatggcgtttcgtggtacaggcaaacagatgtggaactcagcgatcactgaaccgggggccggttctgatgtgggcagcttacaaaccacttatacccgtaaaaatggcaaagtttacctcaacggtagcaaatgctttatcaccagtagtgcttataccccttatatcgtcgtgatgagtcgtgatgcggcttcccctgataaacccatctttaccgaatggtttgtcgatatgagtaaacccggcattaaagtcactaagctagaaaaactgggtttacgtatggatagctgctgtgaaatcaccttcgacaacgttgaacttgaagaaaaagatatgtttggtcgcgaaggtaacggctttaaccgtgtgaaagaagagtttgatcatgagcgtttcttagtggcactgactaactatggtaccgccatgtgtgcgtttgaagatgcggcgcgctacgccaaccaacgggttcaatttggtgagactatcggtcgtttccaacttattcaagaaaaattcgcccatatggcgatcaaactcaattcaatgcgcaacatgttatatgaaactgcatggaaaagtgacaatggcttaattacctccggtgatgctgcaatgtgtaaatacttctgtgcgaatgcagcctttgaagtggttgatagtgcgatgcaagtgctgggtggtgtggggatcgcaggtgaacaccgtattgcacgtttttggcgtgatctacgcgttgaccgtgtatctggtggctctgatgaaatgcagatcctgacattaggacgcgctgtactgaaacagtatcgttaattaatcgcagagcactctcttaacatcaagtgagggagtgttcaaacagtccactgacgaggtgacattatgacagaacatttacccatgccacaatttgggccactagctggagttcgtgtggtgttttcaggtattgagattgccgggccatttgcaggacagatgtttgcagagtggggtgcggaggtcatttggattgaaaacgttgcatgggcggataccattcgtgttcaaccccattatccacagctttcccgtcgcaatctacatgcgttatcgttaaatattttcaaagaagaaggccgtgatgctttcctaaaattaatggaaaccacggatatttttatcgaagccagcaaaggtcctgcctttgcccgtcgcggtattaccgatgaggttttatgggagcataaccctaaattggttatcgcgcacttatccggctttggtcaatatggcgatccgcaatataccaaccttccagcctacaacactattgctcaagcatttagtggttatctcattcaaaacggcgataaagaccaacctatgcccgcctttccttataccgctgactatttctctggtatgacggcaaccacctcagcattagcggcactgtacaaagtgcaacaaacgggcaaaggggaaagtattgatattgcaatgtatgaagtgatgttgcgaatggggcaatacttcatgatggactattttaatggcggagaaatctgtccacgaatgaccaaaggcaaagatccatactatgccggctgtggcttataccgttgccaagatggttatatcgtgatggaagtggtcggcatcactcaaattgaagaaatttttaaagatattggtcttgctcatctattaggtactcctgaagtccccaaagggacacaactgatccaccgtattaattgccctcatggtcaactctttgaagataaattagatgagtggctagccaaccagcctattaccgccgtactaaaacgcctatctgaactcaatattgccagtgcaaaagtgttaaccattcctgaattagaaggcaatccacaatacgtggctcgagagtcaattactcaatggaaaacgatgagtggtgaaacctgtaagggaccaaatatcatgccgaaattcaaaaataatccaggaaaaatctggcgtggtatgcctgctcacggcatggataccaatgcgattttgaaaaatatcggttatagcgacgaacaaattagggagctagtcgataaagggctagctaaaatcgtagagtaaataccgttagactcaggtacaagtggcactatcccacaatacctgagcttacggcaaaagcatgggataacagtttaatggatgtgattggcagacaacacttacggcaaatgtgggatgatttagctgaagtttatgataaaaaaacagcgctaatttttgaatctgcacaagggaaagtcagacaatttagctacagtgaattaaatgaagagatcaacagagccgcaaatctttttcatgcctgtggtataaaaaaaggcgaccatgttgccttacatcttgataactgcccagaatttttcttttgctggtttggactggcaaaaattggcgctgttatggtgcctattaatgcccgctttatgtatgaagagagtgcttggatcattaaccattgccaagcacactttgtggtaacaagtgataatttctctccaatttaccaaccgatgttgcacgataagcactctcctttaacgcaactgtttttaataacagaaaactgtctccctactgaacaaggggttgttgattttttaagtgaaaaagccaagcatcccgttacgcttaatcatcacaccccattaagtgtggatgacactgctgaaatcctttttacctcaggaactacttcacaacccaaaggagtagttattacgcattataatttacgttttgctggctactactcctcatggcagaacgccttacgggaagatgatatctatcttaccgtcatgcctgcttttcatatcgattgtcagtgtaccgcatcacttcctgctttttctgtcggtgccacatttgtactactagaaaaatacagtgcaagagccttctggaagcaaattctcaaataccaagcaacggtaacagaatgcatacccatgatgatgcgcaccttaatggcacaaccagtctcaccagatgaaaagcaacataaactgcgcgaagtgatgttttacctcaatcttgcagatgaggagaaagatgcctttattgaacgctttaatgtgcgattactcacctcttacggcatgacagaaaccattgttggcttaatcggtgacagaccgggcgataaacgccgttggccatctattggtagaccgggattttgttatcaagcgcaaattcgcgacaaacaaaatcagcaagttcctaacggtgtagtcggtgagatctgcgtcaaaggtgaaccgggaaaaaccttatttaaagagtattacaatcgccccgatgcaacagaaaaagcgctagagcctgatggctggttacacacgggtgactatggttatcaagatgacgaaggctttttctattttgttgatcgcagttgcaacatgatcaaacgcggtggtgaaaacgtctcttgtattgaaattgaaaatatcatcgcatcacatcctaaaatccaagatgtagcagtaattggtgtacctgatgatattcgcgatgaagccattaaagcctttgtggtactggttgacggtgaaacgttaagtgaagaagcctttttcgccttttgtgaacagaatatggcgaaatttaaagtgccttccgccgttgagtttaaacaggggttaccacgtaattgctcgggcaaagtgatcaaaaagcatttgcaataagccataagtgggttttcgtgacagttaattataactgcttatttttattgaaaaaggaatatgacatgagccaatcattacatctaacaacacgtggttcagtgcttgaaattatattagatagaccgaaagccaatgcaattgatgccaaaaccagtcatgaaatgggtgaggtatttatgcgttttcgtgatgatcctagtttacgcgttgccattattacaggtgctggtgaacgattcttttgtgccggttgggatttgaaagccgcagctgaaggagaagcccctgatgcagactttggtgctggtggctttgcgggcttaacggaattatttgatcttaataaacctgtcattgctgccattaacggctatgcttttgggggtggctttgaattagcactggcagccgacatgataatttgttcagacaatgcttcttttgccttgccagaagcacaattaggtattgttcctgacagtggcggtgttttacgtttacctaaacgcttacctcctgcaattgtcaatgaaatgctcatgactggccgtcgtatgaatgcacaagaggcgctacgctggggcattgctaaccgcgttgtcagtgcgactgaactgatggatagcgcccgtgaattagccgatcaaatcgccaacagtgcgccacttgcagtcgctgcattaaaagagatctaccgtgccactagcgagctttcgattgaagaaggctacaaattaatgcgcagtggtgttctaaaatattacccacgtgttttacattcagaagatgcactcgaaggcccgctagcctttgccgaaaaacgctcacctgaatggaaaggacggtaattatcacttgaattgataatacaactaagaggaaaactgatgagtatctatgcatttgaaggtgttattcctgttgttcatccaacagcttacattcacccatcagcagtactaattggcgatgtcattattggtgctggtgtttatattggccctttggcttcattacggggtgattatggccgtttaattgttgaagcaggtgcaaatcttcaagatggctgtgttatgcatggttatacggatatggataccattgtgcaagaaaatggtcatattggtcatggtgctattcttcacagttgtattatcggtcgtgatagcctagtcggcatgaatagcgtgattatggatggtgcgatcattggtgaggaaagtattgttgctgccatgagctttgtgaaagcgggctttcaaggtcaggcgagacaaatgttaatgggaagcccagcaaaacatgtacgtgatattagcgaccaagatatgcaatggaaacgtatgaacactcgtgaatatcaagatctcactgttcgttatcgtcaaagcttagttgaaaccacaccattaacagcccctgaagctaatcgtcctcgtttaagaggcacgacagaagtaaaacccaaaggccaataaaccaacagcgacaggcacaacaaacgcctgtcgtattgctttattttaacactcggctatcaattaacgccgttgtgattttgacaacatccattgccatttttgttggtgatccagcccatgagggatcatagcggctaatttctctggggcgcttaaacgacttttactttgcgtatgaccttttaaacgagcgtaaagagcaggatcaatatgactgactttgatcatcctttggcattggcaccctcttccttccaattgattaggaacgcttttggtatcacactcaatctcttttacatcagaaagaatataagaaacgatattaatcgcattacattgggggatatcaaaatttttagcgatctcttttgcgctcacccagcgttgctgctcttgaacccagtctgcaattaacaagtagagtggtttatttatgtcttcttcacacatatttactccaataatattacaaataaaagtttatttatctctaaataaagataataactatatgttaattttatttaaccgcggagtatcggctttccctgttaattcattcagttagttatttaaaaataaataatattttgtatatcattaacaaccaaactctttaattaacacattaattacaatttattttgttgttattaaatataaaataacactaataaaaataaataaaatcaacttactgagtttacagtaagaacggacaaaaagaataaaggaacatgataaaagtgtttataaacaacaaaatagcataaaaatattatattattaatccattaaaatgctaaggttatagtaatagatttatttttagattaccagaaaggcaacttattattagatataaatcaataagtgactaaattacgccttatccgcgtacatgataatttggtagagaataatcttactttaaaaccataagtcgatataataaattattatcaagcaatttaatcagacaatatttctacaatatagtacaacattcagcattctattcttttaaaacactctattttatcaatagcgattttatttaatatagacagaaaaattgaataagaataatatttattttacctatgattattattttattggcgccattaacattaaatggcgccaaataacaaacacaataaaatcattacaatgattggcgattaaaggctaatgaccaatcatcagtaaatttattaatcgcatcatcgactacgggtgaacggataatagagtaggcaagctctatcggaagtgttactgccgaagcgccagacaacagacaatcaaccacttggcgtggtgttttaaaactagctgccagtattttagtgggtaaattatgcatggaaatcagcgtttgcaactctcttactactctcacaccatcagagccttgtctatccatacgatgcacataaggagcgatataatcagcccctgctagcgccgccatcaacccttgagacacactgtaaatagcagtccccaataccaacatatttttttgctttaattgtttaatagcaaccaagccagcttcagtgacgggaattttaatcacagtattatcggcaatattaccaatgcgcaatgcttcttcaatcatggtatcgatatcacgggcaatcacctgcgcaaatatccgccctttgccacccatagcggcttttaattcaggtaataacgtttcaatgggctgcactgattgagcaataatagaaggattggtagtgacaccagcaataggaagcacttgtgaaagttttctcacttcttcaatatctgcggtatctaaatagatttccataatcgcgcctcaatgatgttggttttaagctaaataattataggtatagattagaaagtagcattgtgagcgaaggatttccagtcagtttaatgaaaatagcgccattttcacggcgctaacaattaaacaaaaataaccgttatatttatttaattcttatcattaatataattttttgttattaatcctagccaaaatcttaatagtgttaagattaacagtatgacaaaaataattatttaaataaaatatagcgagttattttttaaattcagcatcaataacttgataaaaagcattacccgtatcagcaatatcccaaacacctaaaataatttgataaccagaacgctctggtatattacaatttaatgttacggtttctgtgggtattttcccattatcatttcgttggcagaaaggtgttaaatcaaaatcagcacgggtcaatggtttattaacatcccacccgggtttagtaataaagaagcgccatgattcagtgctatgttttgcagttaatgtccacttaaaagtattttcgccacttttcattgccactttatgccagcgatctgcactttgtgcatttaaagcagaaaaagttgcctttccaccactggcaatttcaccatctgctgggccacctttagggaaccctttatccccttcaatggattgcggttcatactgtatcggaccacaatttttatttaaattctccccttcggatgaacaaagaaaagctctgctgggtgggatatcaatatagccatgctttaatgtcacctcagctgatgctgttgaaataatacctgcagatgataataataatgttgcagtaaatagcataagtttatttttcttcataataaatcctcaataataattaaattttttaaaatataatgattatgtcaatcacattagatattagtcaaaaatagataattaaatatatatttattaaaatctgtgagcaatatcgtcatttaatttaatattaaaaggagactaaaacagtcatttaatatttattagatgatgattaactattgaaataataaaaatataaacaagagtatataaaataagtttattattaaagaatagttttaaattaacatttcacttaaattaactattctttataaaaattagtttgatgataaatatgccatggcacttcgttaatcaattaaaataacgcattgatataatcagaagtaaaccctcgatattggagatagcggatctgtttcgctctttctttaaaatctttgggtttacctgtaccaaattttttctctttaagatcttggcagagtgcataccaatcagtttctgtttcttctagtacccgtgcaataatttcactgggaaagcctttttgccgtaactcttggcgaatacgcagcgggccataagatttacttaaataacgacgaaaaaaagcatataccgtgcgattatcatccagatattggccttctaataatcgctcgatcacttgctctaagcatctttcatcggttgtgctctgtttagctttatcgacttcgttgatccttcgtgctaaacggcgtttcagctcagtggtaccataatcacgacgcgacaacataaatatagcgtattggtataattcatcataagtcatcgcaactccttaatgttattgcaccccagtttggtatcctgcatatcttatcgcagttacttatcaatgcgaccaattaatcggaacttatcaatagctgtacaaaaatagtacaatcacgcttggtaaaccccgttatttatcaccataaaatcatctgcttttattaagaataactgaagataaagatgattattagttaaaaacacttagataataccgtgataatacatattgctaagcatttttatctgcaattagcacttatagctggtgaccatatataagaaaaagactaaaatttcgcgctactcttttacttactatttggttattttttatttttgtgggttatatatgaacttttctcattttaataaggtagtgtttgctgcctctcttcttgctactggcttttcttatgcggatagcgatcgccctctgctctctttaagtgtaagccaatctggcggcactgcgttaaatagcgaaggttcgttagatacccgtactcctgcaagccaatcgcgcgtattacctatttggggtgatgaagctcgcgcccgaggttatgatttaccagagccatttggagtaagctataactatatgaatctacgtcaagatgtgattgtggataaaattggatttaactctagcaatattgctatgcaaggtatattggatcaattaattattgatgttggccatactcgcagtagtaataaatcacatatggtgaaactcgatagttgggttttcccatttatgaatgtgtatggaatctatggaaagacaaaaggcacatcaacagcacaattgaaatctgttggcttcaatattgatgctcctatggctaaaaatgttccttttaatttagattatgaaggaaaatcttatggtgcaggttttactttagcaggtggttataatcaattttttggtactttcgatttaaactataccaaaactaatcttgatattctcgatggggatattaaagccttagtcattacaccccgtgtaggttacgagtttatttttcaacctctaatcaccggtcaaggtaataccaagctgcaagtgtggacaggggctatgtatcaagatataactcagcgatttaaaggcgatgtgaataaattaaacctgcctggtgagatagcacaaccatggatgaaaccttttatgaatggaatgaaattcgatgttgaacaacatcttgcccataaatggaataatttgattggtgctcgtttagaaatcacccgtaactttaatatcatcactgaagtgggatttaataatcgtaatagttttctgttctctggtgagttccgtttttaatggttaaaacatcttttatttatgggctggcctttgccagcctatttatttcacacacagcgaatgcccaactctttcctgatagacaacaaatcgaccaatggttaaatcaactaggagggagcaataattttgatcgcagtaaaaccatcgactggggcgttttacccgggcctttctatacccctgaattagagttggggcttgggatcgccgttgttgggctttatcaagcagatagtcgtcccgacagtaaaatttcatcactgtcattaagtggctttggttcatcaaccggggcttttggtatgacttttagtaactatacttaccttgctgatgatacatggcgcttttaccttactggggcattaaataatgtgccgaccaacttttggggacaaggctatcatgaaggacgagttaaaaagaactttgcacaatatcgttcacaagagctacatttaacgccgacattgctacgtcaaattaccaaaaacacctatattggcttaggttgggattacgctaacttacaagcagcagcacctgatgatgagtttaaagcctatatgagcaaacgtcatttgccattacgctctaccagttcaggattaagtgtgcgctttacctacgacagtcgcgattttttgcctaacgctcgccaaggccaagcctttgatattagctatactcattattcatcggataccggtagtaataaccgttttaatgcaacccaaatgcagtacaactattattatccattaaccgaagatgcggtactcgcctttgatagctatgctcgctttacctcaggagatgtaccatggacgcaactgtctaaattaagcaacggccatcagatgcgtggctattatgaagggcgttatcaagataatcatgttttttctagtcagatagagtatcggcaaaaacttagttggcgtcatggtattgcattatgggccggaggtggcacattgagtaatcaagcacgtgatctcggtaaaggacattggctacccagtgttggtattggttatcgttttgaatttaaaccacgcatgaatgtacgcctcgattttggtgtcggtaaagagagcaccggattttatttccaagtgggtgaggcattttgatgttaacgcgtttggctatttttaatatcatcttcatattgatcatttcaggatgcactacctcatctgtgtctgaaaccattgccgctcatctggaaagtgaaactcaagaagaagcctcacaagtttggcaaacgccccccgcacttgatgcacctaatggattaaggccttgctgtgcttttggctataatttaaaagtcaaagcatggggaatacctattcctttttatcgtatcgataatattgttgaagcatctactttaggtgatcatcgctataacgataacttttggctgggaactgccgcagtattaggcataggcagtgaaaagtcgggcatagtctattcacataaagggggctttcttgatatcgcccatattcgtgataccgcagattatacttattatctctttagccatatctatcccaaattaggccaagagtggacgctaacactcagtgacgaattagcacagcgtaaaattcactttaaccgctttactcctcctagtagtgatcgacaacgttataccttaagtgcttatcttgccgcgcgtttagcttatcgccttgccgtatggcatgagattgcacagtggtacggttatcgctctgtagcgggattttcagaagggatctccgcattctcaccagaagatctctactctaacctaatgggggcgcgcttatcacttaccctgatcctcaatggtgatgccacaaaccttgagcactataaccaatcaatgcagcgtattattccctcagcactcgctcaactagaggcgcaacctcgtcaggccacccagcagtggtttgatttaattgatggtcaatggtggaatagccaagagcgggtacccgataaatttttagtattaaagcgtgattatcatcttgctgacaaacgctatccggtattgccttttggggagacaactccacctcattatctgacattacccgatgtttacgcaggctattctttaaaacaattagcagaatttcagctttggcctactaaacagatggcaaatttacccatccctaaaacatattggaaagaagcggattttgctgatttagcagaaaaagctcgccaaatcgatcaaaaaactcgaccaaaaacaacaaaaaatgactaaatattgaacaaaattgacatattaaaaacgctaaattatgataaatttgagttaaatagcattaatttatataagaataactgaacaataatcaaaaatcacattttttgttaaaagaaaaaagcgattataaaacgaggtgttccagtaaataagatacattttattaacaatgcactcgtagttatcctaatgtaaggcgatattttgtagctatagaaaaagtaatttgctagtattcgttcgatttttatccagttaaacgaggagaagcaatgccctctcaattgatgaggacaagtgccgtcttcgctttcttgatttcactactctttactggtgtgagttttgcctctaccagtaccggcagttcccgaatgctgcaggcggatacattcaaaagcacgacaacctcgttgccagatttgaaaaaatatccctcgggaactcagcgtaagaaagcgtttttaaatgtcatagttcctattattgataacattaataataagatattgagagatcgtgagtggttaaccgctcaacgtaaagcccaacactggggcagcgcagatttgaaaaaactgcgtgaaatctgtcaatactatggcgtaacatgtaccagccccaaaaaagtgaattgggattcgttactggctcgcgttgatattattccgactcattttgtcgcaacgcaagccgcaacagaatcaggttggggaacatcaaaattggcacagcaaaacaataacttattcggtatgcgatgtggtaaccggtcttgcaataatgtccctgggaaaaccaaaggctatgcagcctacccggatattgaaggctcagtgattgcttatatgcgtaatctcaatacgcaccgcgcctataattcactgcgctcatcaagagcacagcaaagaatgacgcaacagcaactcgatccacgccagttaatcaccgacttgaaaggctattcagaattaggttcaagttacaatgattatctgaccgaaatgttcgactcaaataagaagctgatcacgcaagttcagttacagtcgaaacgagaaagttagtcctaaatagctattcatagcaaacaaaagccacttttcatttatctgaaaagtggcttttatttatcacaagataatcttttgattgaaagcaagctaataattcataatatagggagtaacacatttggtatgactgttaaatcacacccttagagccatttatgaattttttttcattcgagtttctcggagcctttacgagcttttttattatctattggctcttccaaaagcaggttaagatccaaaatatcttactcatcatagtaagttatgcttttctattctatgtcgactaccgtcctgctgttatcttattaagctatacgcttttgatttactcattagccaatatactcacccgctatacctcaacgaaagtgatttattggttactggggctgttagttgccctctattttactgcctttaaatattactcatttttccaagaatcattgacacaactattctcacagtggggattaagtgttgaattaccaattattgaactactggcaccattagggttatcgttttatatcttccactctgttagctatgtcgtttcagtgtgtcgcaaagagatccctaaagccccttttcttgatgtcgtgctctacttatgctttttcccaagcattgtggcgggaccgattaatcgtgccaaacaatttttaccacaaattcaagcaccaacccgtaaaattatcgactataaaggggctatcatgctgattgtattagcaatcgctaagctcttttggttaagtggttggttgtcgacaaattatgtcgatcctatttttaatgcccctgatttagccactagcggacaagtactggtggcgacctatgcttatgcatggcatatctattttaacttctcgggttataccaatttagtgacaggtattgcgctattactgggttttgttgtccctcgtaactttaatgcaccttatttagccatcaatcttgctgatttttggcgccgttggcatataagtttatcaacgtttattcgcgattatgtttatatccctttggggggaaatcgtaagggcgttattcgacaaaatgtgaatgcctttgccgcgatggttatctctggtttatggcatggcgcagctatgacgtttattatctggggagccattcatggtattggtgtggtgatattaaatatcaaacaccgccttttccccaccgccaaacatgacgccaatagcatgctagcatcattaaaaatgttgttatcttggataattaccttccattttgtgtgctttgcgtggatcttttttcgcagccaaaccgtcaatgatgcttggatattaattcaacaactctttagtgcaggtgcttggcagtcgctacaagccgaagggctaaccctgtttatgttctggggactgttcttactgtatccttgttttgtcactttaagggcaattattgcgcgacttgagaaaaaagtgccttggtatgtttatccactaccattagcgttgatccttacaattatatttatgttgtctcctgatggggttccgggatttatttatgccagcttttgatttcagttcaaatttaaaaaagaccgtaaaagtggctttaatggtgctcttcagcacactatttcttatttggctaaaccaaacatcattagagcgcttttggcaacaacaataccatcgcccagccccttggtcgggtttatcacaatattatgcttggcaagtgggaggtcagttgcgagatggcgtatttgtcgcagtaacaagctatagtgattatttgcgagttaatcacccggataatcaggctaaaccaataacgcctcgtcaagaacaaaccgcctttccagaaggatttgcagtagggctacattttatcaatggctatactcgccccgcttcgcaattaacacaacagtttccacaactcctacaacgtcaatatgcacaaggtacattagcaaatacatcaactattgatctgacaaaagccgctgctgaagcccaaaaacctattgtgcaaaaaacagatgtcatattatctcccaaagacaaagtgctgtttgctggagattcaatgatgcaaggcgttgcccccttattaaaacgtcaattgcaaacagattataatataagcagtattgatttgagcaaacagagcacaggattagcctatcctaagttttttaattggcctcaaactattgctaatcggttagctagcgatgattccattaagttactggttgtttttttagggcctaatgatccttgggacatgcccccagatggtggcggacgttatttaaaatttgccagtgaagcgtggggtaccttatatcgcgcacgtatcgccagcattattgataatgcgcgccaacataatgtgagtgtgatttggattggtcctccgaatatgcgtaagcaaaaattatctcaaggtatggcttatctaaatcaactttaccgggaagaagcagaaaaaacgggagaaatttacctttctgtcaatgatatgtttaaatatgaaaaagatatttattctgattatatcggtgatggtagcagccgcgtgaagctaagagcaggcgacggtattcactttagtttaaaagggcaacaaatcattgctcagcaggtattctcgcgtatccatctgcaaaaagttgatgatgtgccagatgatgtaacagacaaaaatatggtcacgccaaatgaaacaattaacgcacatccttaaacctcgaaccttagtcagtcgttctattatactggctttggtttcgctgttagtcgcttgtaaccaagagaaagataaatctcttacgctatcaacacctagcgtgttacctgcagatggttcaagacaactctacaactaccacgatcccaactttgccgcttttgcgcaaaagttaaagcaacgacgccaaagggtacatatcgtacagttgggtgattcacataccgctgcggattttttcagtggtaaactacgtgaacgttttcaagctgattatggcaatggtggtataggttttattccccctaccgctattgcgggtcaacgtattgccaatatccaatatcaaagcagtaaaaaagcgtgggatttactttctagtcgcaaagaaagcgatcctgattttcccttagggggatttatcgctgagccagtcgcgaaatggtcagcattgcaactaaatgaaaatccgacaacaggtcagcgttaccaattacaagcgttatataaggcgcctacggcttcacaaatccatttacaatccgctggcagtaaaacactttcactttcacagacacaaggtgaatggcaattttctaaacccacaacgatcaccttcccaatcaatattacgattagtaaaaaccaaccgataaaattaggcggttggttaattagcaaccaaaagccaggggtgatgttatccgcattaggtattaacggcgcaaccattaatatgatggataaatggggagcacagtggagtaaaacattaggccaattacatcccgatatggtgattttagcttatggcactaatgaagcctttaatgatacgtttgatttagtggcttaccgacaactgcttgttgaaaaaattcgtcaaatccgccagcaagccccgaatagtgccattttattaattggtccgtcggattctattaagaataaagacgcatcagattgtcgctctcagcaaccccaatggttaaccgatattattcgtatccaaaaggaagtcgctcaacaagagcgtacattattctgggattggcgcgattatatgggtggagagtgctcaattaaagcatggtctatttatgatcttgcaaggccggacggtgtccacctttctcgtgaagggtatgaaagtagtgcaaatactctctatagccaattatcagcgctgattaataaaagttagatattattataacgaaaaggagcctcagctcctttctcgttatgtggactctcagtcatcgcattattaattatgtaaagcatcaatatatttaatgacatcaacactcgcttgttccatttgctgaatatacttcactaccgcatcctgatcaccggccatattcgccgccaatgcaagacgcccactttgatgaaccaatttatgaggctcttctaaacgacgaaaagcttcactgccagcaaatttgcgtccttcaccttggtagtaccattttcctaaacgacattcagtatgctgattaacacaattttcatcatcattatttaataagtgaatataaatcgcttctttccataaaacatgatctattttcacagtattaaaaaattgttgtatcgacataaactgaaagatattttttaaatcattggcttgttgagcaagcgcagataaattagcatgaccttccgtaacaagattttttatttgcttaagttgttcttgatttttctgagtattttgttttattggtgtaaagcgggcacttacattattgttgatagacgctatttctgaggcctgattttggatcttttgtgaaaggcttttcatctcttgtgctaatacagaaaatcctgcacctgcatgacctatatgtcctgcctctattgctgaattaattgataatatattggcttgatttgacagtttatcaatattattagcgctatcttttattttatttagccatttagcaaaattctcaatttcttcattactatgagtaaaatgctcatcaatttcattaaaaaagaccactaatgattctgcattgataagcatgtcattaaagagatgttccatttcttccagcaatgctagcttttcttgtaatttctgactagatgccaaaatggaatcacgaataagtgtaatagtatgaatattacactccgtatgctgtttaaacagtgaattataatcacccataaaaatatcagcctcaccatgttcacaaaacaataagacctgtagattaatcagttgttaactattttctatcagatttaatggtgatttatagcaatgaaaaatggcgcacctattgatgcgccatttgttaaaaaggaacagctcatttttataaaaatgcaaagaaaatcattccaaccactgcgcctgtagtacctaaaatggtttccattaatgaccatgtttttaaggtttgcccttctgtcgcaccagtaaatttaccgtataaccagaagccggagtcattaacatggcttaaaataatagagccaccggcaatacaaaccgataacgccgccatttgtgcaccgctataacctaattcactgatcaccggtaacactaaaccaaccgcagttaaacaagccacagtcgcagagccttgaataacacgtacagcacctgcaagaataaaacaagccacagcaatcggcatacctgcaccaattaatgcattccctaatgctggccccacacctgaatccaccagcacctgtttaaatacgccaccagcacccgtgactaataagatgatccccgcaggttggatagccgcagagcatacttccatgactttttctttgctcataccacggcgaatagccaagccataaatagccactaaacacgccacaaggatggcaataaaggggtgaccaataaactcaagaatattgaatagctgagagtcaggctcaacaaaacgcgcaccaatggttttacatccaaccaagactaatggcaataagaccaatgcaagactgaagccaaaagaaggcattttactttgtcctaagcttggctcatcaaaatctttcggtaattctaaggtcacataacggctaataaagttaccaaaaataggccccgctaataacatacctggaatagctgcacataaaccaattaagatcatccaaccaaaatcagcattcatctggtcagcaagcaacataggcgttggccccggtaataagaaggcagcggcccctgcaacaccggcaaagagagggatcgccattttaacaacatttccccccgtacgacgggcaacagcaaataccaccccgatcagtaaaaccaccgcaacatcgaaaaacagaggtaatgcgcaaactaaacccgcaatacccagtgcatagttagcccgtttttcaccaaaggatttcagtagccgtaccgcaatttggtctaatgcccccgtttcatgcagaattttaccaaacattgcccccaaggcgaccacgatggagagaaaacccagagttccccccattccgttttgcatggtttgcgtgattttttctaacggcataccagagaaaatgccagcaccaatagcaacaatcattaacgcaataaaggcgtgtaaacgcgcatacattacaaagaagagcaataataggacggagccaaccgcagttagcaccagtgttaatgtactcataccgcactctcctcagtaataggtttagtaacagattctatagtgttgatgacattttcaatcacgttatcaagagatggcgaaatatctatttcataaacatcaggttcgtcattcgttggctcttctaatgtttcaaattgagtaatcaacatctgtggtttaaagaagtgacctttacgctcttttaaacgactttcaattagcgcgtaatccccttttaaatagagaaaatgtaagcagtgattaccttctcttaacatatcgcgatactgtttttttaatgcggaacaaacgattaatgacactttattggttctttgcattgcaaaagcagcatcattgagagcgtgtaaccaaggtttgcgatcttcatcatttaaagcatgacctgaagccattttagtgatgtttgcacgaggatgaaggaaatcgccatctaaaaatgccgcaccgatacgttgtgctacaccatttgcaaccgctgatttaccgctgcctgatacccccattaagataaagacatggtgtagggattgggtatctttcatatattgctcctttaggcagttattaacttttttgtaatgttacccgtaactgttacgggtaacattactcgatccagaaagataaaaacaacctacaaaacaaactatgaaatgaaagtgtgaagcgtctcgcaaatagattgtggaaaaacaacaaagttacaacaaaatcataagtaattgataagttaacgactgatttttacaaagcaaaaaaacgtcaggatatatcactctataatcccaaatagggtcaataaaaaaaccctaccaaagaaaaaaataatttaataatcaaataaataactaaatactttcaccggtgatgatacggaatcccacatcaatcacttgcccacgagcaattttacccttcattctttttagtaataaatccgccgcttgttgtcccatttcatcacgtggcgtaaaaatactggctaaccgtggagtcatgacttgtcccacatcatgaccgtggaaaccggaaatagcaatttgctcaggtaccgcaatccccatacgctgacattcgaaaatagcccctatcgcaatatcatcattggtgcaatagagcccatctaagtcaggatattgcttgcgtgcctcatgtaaaagttctgtacctaacgaataagaagagcttttaggtgtcatcacatgacctatgggtaagcctgcttcttgcatcgcttgttcatatccttgtaaacgcattaatgttcgctcatcttgtcttgccccaagatagataattcgtttacaaccacggtggatcatttcgctgaccatttttcgcgaggcttcaatattatctaaccctaccgccgaatcaaaacaaggtgaaacactatccataatttccaccaccggaatacccgccgtttccagcattttgaccgttttgggtgtgtgtgttctttccgctaagatcaagccatcaatattataagaaagcagagaaataagacgctcttcttctttttctgcttgatagccatagtgcgccaacatagtttgataaccatatttatccgtcacagattcaataccacgaataacttgtgcaaacacttggttagtaagagaaggcaataatacgccaatcgcatggctggtcgcattcgacaaaatatcaggtgcacgattaggaatataattcaggctgtctaattcacgagcgattttgactcgtaatgcttcggaaacttgttctggattacgcaaaaaacgactaactgtcatttttgtgacaccaacacggtcggcaacatcctgtaatgaggggcgtttttttttcattttatatcgtaactatccaaaatatcagtattaatacgcacttgaggtttatttaacaaacctgattatatccttaggttatacactatttcgaataaagtttatcggatgtcttcttagatttaattttgaatgcctctcccttgacttaagccaaaggaaatatagtatgcatcgttatataatttatgaaataacgattattaatataaaacaacactacagtgtgaacctatggctatccacagacgacaatttctgagttatttaacgacgcttgcagcattatcagcactgccacgttgtgcaagagcggcaatcacttcacgtatcgctgctcaatttggtgtgcttcctacaccagaaaatattcatcgcgttattagcgcaggcccaccaaccgaccaactgttgttggctttagtaccagaaaaattattaggtttctcctcgcttaatctaggaaaaagtagcttatttgccgacaagttgcgtaaattgccccatttaggccgtctgtctggccgtggtagtacactctccttagaaacattaatggcgctagagccagatatcattattgatagtggtaatgttgatgaaacctatcgttcattagctaaacgtgttagtgcgcaaacagatgtaccttatgtgttaattgacggcagcttaaaagacagcccaactcagttacgccaaacgggggctttattaggtgtggcagaaaaagcagaaacattagcacttattgcagagcagtatcttagtgatgcgaccttgtttgcttctactctaaaaataagacctcggttttaccttgcacgtggtgcgaaaggcctacaaactggctcaacaggatctattcatactgaagctattgaactattagggttcgaaaatgtcgctgatattgcaggttttactggccttactgatgtttcccctgaacaactccttatgtggaaccctgaagttatcatcacacaagatgaaaatgcctatcagcaaatcaggcaagactctatatggaaaaatatccaagctgttaaaaataataaagtgttattatttaaaggcttaccatttggctggttagatggccctcctggtatcaaccgtttaatgggaatgcgtcgcttacagagccattttgaccatcgaatagcagaacaagccacgcaagatctgcaaaattactttgcttgtttttaccatacatcgttaagtgctgagcaatgccagctgttgatgaggtcttcatgagccaatcagcacgtatcactctgttgttgctgttattctcagtggctgtagttattgctatcactagtggtaagtattcacttacagtcaatgaactgtggacagtcgtcagtagcaaattaaccgggcatattgaagagagtcgaacagcaaccgtgttctggcaaatacgcttgcctcgagtgcttgctgccattttaattggaggtgggcttgctattgcgggggcggcttatcaaggtatgttccgtaacccactagtatcacctgatattctcggagtgtcatcaggggctggtgtcggtgctgtattgggtatttttcttggtcactccatgttgtcaattcagctttttgcttttgtcggagggcttatcactgttgctttagtctattttattgccaaattggcgaaacaacaggatccggtcctttctcttgttttagttggtattgcgattagcgccttatgtggctcagctatttcattaatgaaaattttagctgatccttatactcagctaccttccatcactttttggctgttaggagggctatcaactatcacggcgcctgatttactctctgttgcacctttaatgctactcgggtttattccactgattttattacgctggcgaatgaatattctcagcctttctgatgaagaagcgcgctccttaggccttaatgtagaaattaccagacttatctttattttatcggccacattaatcaccgcgagtgcagtttctattgcgggcattattggctggttaggtttaattgttccgcatatcgcaagattgttagttggtgctaacttcggatatcaactgcctatttccttacttgtgggcgcaacaatgttattaataacggatacactagcacgaactattgcgaatattgagttgcctttaggcattttaacctcggctattggtgcgcctttctttctgatgttattactcaaaacaaggcgggatagatgatcatcactgcagctaaacaactcacaattggctataaaacaacacccttgatccaaaacctctctttttatattaaacaagggcaaattgtctgtttattaggcgcaaatggctgtggtaaaaccacgttgatgcgtaccttacttggtttgttacccagtcttgcaggccatattatcattgaaggcaaagaaataagtaagtggtcaccaactgatttagccaaagtgattgcctatgttcctcaagcaacccacctccctttttcttttaaagtgattgatatggtgattatggggcgtggagcacatatctcttttttctcgatgcctagctcacaagataaagcaatggcaatggaaaccttagaaatgctttctctttcgcatcttgctcaccgcacttttgatacgttaagtggtggtgaaaaacagttggtattgattgcacgggctttggtgcaacaacctaaattactgattatggatgaacctgctgccagccttgattttggtaaccaaatcaagctaattaaccaaattaagacactaaaagccttgggtataagtgtgtttatgtctacacatcatccacaacatgccgctttactggcagatgaggtgattttactcacccctcatcgccacgttttacaagataaacctgagcttttgctcacccccgaacatttagctcagctttataatgtgaaacccactgatattcaggcgcacttttacgcctaccctgataataacaatccatataggcaagaatatgaacaccattgaaaccacagattttgctgagctttataaaaaccatatgcaacaggcacaaagaaccaaaaaagagcctgaacattgggataaacgcgctgaaaaaatggcagaaaactgtgcgaatcccaacgatccctatttgatcaagtttcgtgaaatgatggatttttccgatgctgaaacactattggatgtcggctgtggacctggctctattagtattcatgttgctgacaagtttaaaaaaataatcgggatagattatagtaccggcatgctaactgttgccaaacgtagagccgcacaagcgggtattcatcatgctaattttcttcattattcatgggaagataattgggatgcgcttccaccttgtgatattgcggtggcttcacgctccacattggtgatggatttaaaagctgcgctgttaaaactaaatcgccaagctaaattacgggtttataccactcacaccgtatcacccacttttgttgatcaacgtattcttcgcttattaggtcgcaatgttcccacattgccgacctatatttacgcagtcaatatccttaaccaaatggggatccaccctaaagtagattatatccgtagccgtaattgccaaaataattttaatagccttgagcagtttattgacagtattaacttctctgtagggcctttaaacgaaaatgaaattgcacacttaaccacttattatcatgaaagtatgaaaaatgatgtggcccttatatcgccaacgcgtgattgggcgatggtttcttgggatgtcgttcctgaaagcgagctaaccttatgatttattatcccgatgcttttcttgataatttattgctggaagatattcaatatggcgatttgacttgtcgcgcactcaatattaaccatcaattaggcacaataacttttacatgtcgtgaagccggctgcgtcagtggaatcaccctaggctgccgtttattagcaaaattaggactgactgtcaccgcacatctacaagagggtgattttgccaagcaaggtgattgtttaattagtgcagaaggtcaagcagatgcactacaccaaggctggaaagtggtgcaaaacgtgctggagtggagttgtggtgtgagtgactatatggcaaaaatgctcgaaatctatcatcgctaccaacctaaagggcaaattgcctgtacacgtaaaaatatccctaatacaaaattactggccactcaagcggtacttgcgggtggtggtattattcatcgccaaggctgttctgaaactattttactctttgctaaccatcgccattttttatccgagccagataattggttacaacaggttacacagttacgccaagcagcacctgaaaaatgcattgttgtggaagcagataacttacaacaagcaagagaagcgttaaaagcgcagcctgatatcttacaactggataaattctctattgaagatattaccttactacaacaagaggctccgcagattgccccacgctgtcatctttctgtcgctgggggaattaatctaaatactattgaaaaatatgcccaaacagggatcggcttaatggtgacatcagcaccttattacgcaccacctagtgatatcaaagttcgcctttaccctaaaaattaaatcaaaacacagataaaaatattagtttattgactgataaagatgagtgcctacattaggtaagcactcactttgtaactttaacttgcgcctatcgttatataaacaattatatattgagattaaaataatgaaactaacacctctatgctgtttattccttgttctactgccttgcagtgtaatagcccagacaacttaccagcaatcaatccctgatgtattaaccgtttggagcagtcccattgcggcaaatcccgatgtattaacacaacaacaaatgctcgaacaaaataaagtcaatgcggcacaagcactggcaacattacctggtattgtgatgcaaaaatcaggtaatcgtaacgaatatacccttaaagtacgtggttttgatagtcgccaagttccggtgttctttgacggtattccaacctatgtgccttatgatggcaatctcgacttagcgcgttttaccactaacgatctcgccagtatcgaagttaacaaaggttatacctcattactgcaaggccctaatctgatgggaggtgcaattaatatcaccaccgcaacgcctcgcaaaccattagaaggtcatattgcttattcgcaaggttttgctcgtggtgctgattatgctcataacatgagtgctcgtttaggagcacgtactgaatatggttttatccaaattagtggcagtcaactccagcaacgttttacccccatacctaatgcagatgaaaataataacgcagttgggacacatggacgtcgtagtcattcagcaacagatgataaacgaggaatgatcaaagtgggttggacaccacgcgcttctgacgaatataccctcacctatgtaaaacaagatggtaataaaaatagtccaccgaatagtgatcctaatgccaaaggtcgatataaatattgggcatggccagattataataaagagagttactactatagtggtgtgacacaacttacggatagcataaatctacaaagtcgtgcttatcatgataagtttgaaaataccctttatatgtatcctaaaaaaggtaatagggtcgattatagccattatgatgatcacagcacaggcgctgcattacaattcggtatcgatatggaggaaagtgatctgctctcttttgcggtacattggaaagatgacgttcaccgtgcccaaaaagaaaaaaacggtgattgggtacgttttaaagatagaacttggtcattagccacagaatatcaatgggtagtgagtaacgatcttgatgtcgttggcgccataagttacgactggcgcaaaagtatcgatacagataaaaaggctgataacaacaaacaaaatgccattaactgggaaatcatggctaaatattcattagccaatgacgataatatacgttttacaatctctgatcgcagtcgcttccctacccaaaaagagcgctataccaccgaaaaacccaaagatggatcaagagggattattaaccccaatttagatccagaacgcgcattatcctttgatatgacctacgaaggttatctcaatgagaaatggggctaccaaactagcctatattacaatcgtgtaagtgatgccattatggcgcatacgctttatcgtcacggtgaagcgctatttcaaaaccaaaacagtggacgtgttgattatctaggcttggatattggtactaaagggaaaatgaccgattggctagaacttggcctaaattatagctatatccatagtgatccaaagcaagttgaccatattgaaggtttaccaaaacataaagcctatatgtggttaacctttattcctgttgaacaagtgcgctttactattatagaagaagcacaaagttggacttataaccgtatagatgagaataataaactggctggctatacaaaaaccgatctacggttagattatgatgttggatatggtatttcagttaatgcttccattaataatctttttgataaatcttatcaatatacacaaggttatatagaagatggccgtaattattggttaggcgctgaatataaattctaatcagctcactcaattataagtaaaagcgctattaaaaaataatagcgcttatttttcaatattcataaatccatattatatgcaaaaaataatctattaataaaatatcagaaacgtaaaaatccttttgccatttctaataaagtgttcattgtactactgacaatcttaacaaaattatcataattactatttgctgtactgtattttttggaaagttcatctaaattagtgttaattttcttatctaatgcgtcgatggtttttctgaataactcaaattctgtttgattaatatcatccgtgttagataccttcttagatagatcatttagcaatttttctaggtcagtacaatcaattctacctcgacaatcaatgtcaacatcaggctcccccccacgcctttgtattgatacacttattccatttataccttttaatagtttttctaacgcatctgcagcattatttacctgttgtagatcgctataatgaacttcttggccatcaatggtgcgtaaatatgtcccatccttttgatgttgaaaaaacaaacgagatttaaaaacaaaaggatcgtcgacagtacctgttggatttttatatttatctctaatgttagataagtcattaaaaaaagatttaaaatcaaaattcaccgtaccttctttacttcctgctttctgatatttatttaaattagatatggtttgccttagttcattgacaaaattcatgtagttagaaaagatatcctttaatacatctagataatccgctttgcctgaaacaatagattgtttaacattattaaaaagatcacttaacgaatcagtctcataactattatctttttttctaagatcatttagatcattagaaaattgatttaaaaaatcatttttatcattaatggttttattataatcatcatctaaataataatatttatctgtatcaggtaacttctctataaatttattctttctattattatcataattcatatcttgatattcccgattaggttcccaagataaaaaatcctcatcttctagcaggttttcgaaataattatcagtatttactctagtatttaaatgaggtaaatcgttaatcccctcagtataaactgaaatatcattagacataatcttaaccttttatattaaataaaagtttataaaaaaaatatgattttatcttttaaattaagctcttacatttgaagaaatcgtagaagctgcatcctgctgagcatgaattatcgcttctattgcttgtaataatgctcttataacttcagtcacttctcgctgtatctcattgttattattaatcacattattattaatacttcctctcgcatccaatactttttgttcaccttcaattgtgctattttcagattgtatagtttggtctgcaacccttgctaatggatctgccaaagatgaaatagtatttcccatcactatggttggattggaatgcccaataagctctttccccatccctttaatagaaaaagtggctcccataccatgtatagccatagaaattccagcactagtaattgcagaaccaatcataatattggcttttttattaagattatcttttactttatcggctatatccaattcaatgttcattagcatcacacccatttctctggatgcttcaaatttttttatcattgtttctaaatatttaacaatgagatctattaatttcatcatatcgtctgaaacaaagttaaaaatccccgttctttctactttaacatgatcgtaaatatcattatcattatctacttctaatgaatctaatatctgtttaagatctggtttagttatatgctctggttcagataaaacaggctttagattaactctgtctattcctgttaatttacttaagctaggtgctacctctttatataacttatttctatcaataataccctcaccttcatcagcattattgattgtagtttgatagtgattagatacattatcactattaatcttcatactcatatttatacctcactaattttttatttaaatagatatatttcttatcatgtctgattttaatttattacttactgaagatttatcgctgaggttttttaaaatatctgttatagaatcaatattctcatgataagtttccattatcttatccattaatttttgaataatatctaaaaccgcagttaattttttactaccggcaatagactggattatttttgacgcgataacagaaccataaatattaacagtatttgttgctgctgaattggttaacttagaagcaaccaccgttctattcaacataatacttgcttttttagaaatctctttagctaactgcttatcaattttttccagtgcttcttcaagcgctttaataatgatatctttgatcattttccccaataccgcttcaagtccatcattgagcactttttttagtatttgtctaatttgctgattcgatattttattaaccgcatctgaaatacctttcatggcaggtccaataacaaaactcaatgccgtagcggcaacaaataaaacgactgtgacaagtattttagttgccattttcaatttgtcttgtattgaatttttcatctcttcgatgatttttttatctagccctaattctttgagtccatccaaagaactattaactaaactcactagaaaatcactaaccttatcgatagcttccataaccgcatctgatatgggttgcataatctcatccataaaagatttattatgaatagattgatacacttcatcagcaatagttaacccagcatcagcaacaaataaggttgttgcgactcctattaataccattgaagagccagcggtaaaaatagaagaaacacctgcaacaagcgttaataatccgcctaatatttttaaaccaataccagcccaaaactgaatttcttcttgttttttgattaatgatttttgctcttcaactttatctttaagtgatttttcagtcacctcttgcatttcattaaaaagtttctgttcactttccgaacgatgtaacatgacctttaacgtcaactcacgtgtcttagataacagaaatgtcagtaatgacataccggataaagagttagatgcaatttcaagctccaaggaactttgtgaaatagtcagttctttaaatagacctcttatttctgctaattgtttttttattgattcactttcttttttgttgatcaatgcctttaattcatcagtatgtgaagtaattttattgattttatcttcacttaaagaaatatttggtaggtaattaaaagaatcatcaaaaaaaccatccaattttttagataaattatctagttcatctaatgaaagcttagaaaaatcactaggaaagtttaagaaagggaaaacatcttcaagggctttttccatatccactttagagtgaatatttcctaataataactgttgaattaatgaatcaggaatattgcaattatttaaaaaacttttaacttcagactcttttttgaaattcttttcttttatttggttataaacttccatccagtaatcaacaaaagcacctttggttttatcaaggtcattgaagccagatttaaaaagttcttttaaatcatctatgccattagatagcttttgtaatttatctctgtaataatcaaatttctctggatctttaattttattcaaaatatcttcatgtataacatgctggtaagataattgtaaaaataaaaaatcataatctttgttggattttttattttctaaatgatcgggactggaagtaggtaatgatgaattttgttgtgcagatacgtcaagatgatcatctttttttttattattcttcggttcttcttctgctaaggaaggcttagtattgtcttcatcattttctagtgaaaatgtcgtcattttatattgtggatcatcttgaatattaattcttttcgcattcctctcctgttcatgaggtactctaagaagtggtatatcaaacttactttgattctccttctgttgttgagtagtcacataattacttatattattaattgcatttgcttgcttagtagtatttttaataacattttttacttcttcagaaacaaaaggcgaagctaatctactatgttcattactttgattaatcttattcatactattattccttttcttccttttcttcctctttattaaggacaacaagaggaatatcttttaatagctctaaatagctattagccttctcttttatcgtttgatcattaatattttgagccacctgatgaaaacaatatttagctttttctttttcaccaattgataaattacattgtccagcataaaaaacaggtcgataatcatttttagcatttagataagctaaagcataaagatcgatagctgcttgatattgcttttttaattgattaactgcagcaagtcccataatgtaatcaacattataaaaatcatagagacataaaaacttaaaaatcgcctcagcttcatctaacttccctttctgataaaaatcatacgcaaatgaataaatcccttccataaatccatctggaatttcactttcatctttgatagatgcgccattttgtacaatagaaacaatgtagtttgcgagctgatctaattctttttctgacattttttcatatgctgacattatgataatcctttcatctatgatgaataattaataataatattctaacttaattattaattacccactttaataaaacacacgtctatattcataattataaatatttcgactaaatttattaattattgatatagtccatttcttctcgagataacccttcaatttctactctttttagccaaataagaacatccataacatctaataaatcttgatctattatcacttcaaataaatgatatttatgatgtagcttccttgctaattcaggataacgaataacgggtgtaccaacttttttggcataggcctttactgctaatgctttagcattagtacaactcaatgaaactattggcattatgccattatcaggatcgaagtagatacctaccgcgacatgtgtgggattgacaataacagctgatgagtcgcggatcacacgtttcattggctcatcgagtaattcttgatgaagttgtctacgtaccgattttatttctggatttccttccatatttttatgttcttgcttaacttcatgtttttccatcatcatatcttttatgaataaaaagaaatcagcaataatatttaaaataagaataggtatcgataaaataaaaaatataaatataaaactaacaactaatgagcaccatttatcaatcaccccctctaaatcagcgcgatatagtataacgacttcccccatatgtaaaatcatgaaaacataacaagttattaaaaatataataataaataatattgtttttaaaaaatcttttattgttcttatgctaaatatttttttaaatccagaaatggggttaatatgattaaaatcaattttaattgcttcagtggcaagtttaaaatgggagctaaatagagaagggattgcgccagataaaaaagtcacaataatgatcggtagtacaatatcaaagaataattttgatataacttcaacataactctttaaagaaatacctgttggatgcagtaaaagtgattgataaaattgattaaattcatccaacttcacttgattaaataaatatataacaccaatgaaatagactaaaccagaaaccagttccttacttttaaacgattgtcctttttttgctgaatcatcaagctttttctgtgttggcttttctgttttctcagccatgataaatactcataaaaatagaataaaagtatctactgttaaaaaaatgatataattcattcgtcattgctgaggtaaaaaagagcaataatactaaaaaagcgataatacctttgatacaaagagagagagaaaatgcatttaattgaggacaaaataatgaataaacccctaatgcaacttcacttaagaacatggtaattaatacaggagaaaccaaaataatcgccactttaaccatatcatttagccaatgaccgataaaatcgtaaccgatatttttattaatatacccaataggaaaaacatcgtaactctcttttatggtactcattaaaacaacgagcccacctgtagctaaaaaataggccatacaaaacaatccggttaatgacgcaaattctgacgattcaatacctgtagtaggattaattgtatctcctatgcttgctcctctttgattatcaacgaattctccaaacgcagaagctatccaaaatggcgtggcaagtagcaagccgataactagacctataattaactcactaattagaacaatagcccaagtctctcttaaaaccccagttatcgtgatgctaggttttattcctaatgctatataaaaaataataatatattttaataattgactattgagaactcgactattgaggaatggaataaacataaaaataggaaataatctagcaatgagcaaaaaaatatcgattaaataagattgtatatattgcaacagtactagcatgatagttaccctgctaacccaatcgtcaacatctctttagcataaattagtaacttatctcccatccatcccatcatcataagtaaacaaacaaaaacccccacaagcttgacaccaaaaggtaaagtttgctcttgtatctgtgtgatcgtttgcaatagcccaataagcaatccaataaaggtcgcgatagcaataggcgcagctgaaagcaatataatcaaataaatagctttattagccgcataaaccatatccactagttcaccgccatcaaatcaagatattgattaatgagtcccttagataacagtccccaaccatccatagcgataaataaaataagttttaaaggtacagataatgtaatagggctcatcatcatcatacctaatgctaataaaatgcatgagacaactaagtcaataacaataaaaggcaaataaagatagaaacctataataaaagcagattttatctcactaagtgcatatgccggtaataatgataagagtgaattttctatgttttctttatcaccatcactattcggtctattctcttgcgcttgttcaaaaaaagctaataaatcaggatctgagtaatgataaaggtattttttataatcgcctaacgcctcatttgaaaatgactcaatcgcatctggagatgacatatccactttattttcaataatatagtaacaaatgtttttagtaattggtgtcataacaaaaagagccatcattaaagcgatagcattaagtaccatattagaaggaacttgctgtacacctaatgcattacgagtcatgactaaaacgatagaaaactttaaataacaagttcctgcagcaataataaaaggagccaatgtggcaagagctaggatcaagattaattgtgttgagctttccatatgttattcacattttatagataatttattaatttctaccgctaacatatctttaattttgattaattctccttgggcaatagctttaccatttgctaaaatattaatatgacgaatggcattatcaggtaaaataaatttcttccctggtgctaattcttcaagttgatcaattgataatgttttattggctaaaagaaaagatattgtaatcggaatagcgccaattgaatttaaatcaagtgattgagctaaatcaatgctatcttctattatggcatcgttttgctcatcctcttcattttcttcactattttcaacaatagcatctaatgtcacacaattaccctcatcccatgaaaaataaaaatattttttatcaccaacattaaaagaaaaatggatatcatctattaataaaacatcccctggtaatattgtttttaataatgaaagtgatattttactgtaacctaaaataaaacttgttataaaacctattttattttttggaaatactgtcaattcatatttccatttaatatcgcaaataaaaacatgacctaatgtggtatctacacaaggatagcaagatcctttttcagcacctaaacagatattatcaacacatgatgacattggctctttagaaaaaggaaataataatgttgataaagattgtgaaaaaagagcaattaaatagttttcaggtactaattcccaatcaatttttttttcaggatataagttatccatgacttgactaactgaaattaacgccgttaaggttcctaatttattctcacatctcaatacaaaatatagctgtttttctgttattttttttgtaccaaagatagaagataatattaccatgtcattaattttatttgtttctttatggttattatctacctctacgttaatactcattcattttcatcctctctttcataaatagcattaatagagttgatataccacgatttatttttatggctattagttagatctatggataatcccccattatattgcttcaaattctctaatgctgtttgataaacgcgtcctgaggaggcaattaactgaacttgtttatcaataaaatgaattttagcctgatgataacgactcttccattttgtaaatgtataagtaatgcttggtggtagagtcaacatagatatttttttatctattacttgccaagcaggtagctgtgaaaccattttggctacttttggtaatgcaattaccgtttttattggtgtaacttgcgaagaaaaaggaacaactttattagtttcagtgatattttcttgataaatttccggttcttcttttgtatcaacttttgatacgttatttagcggcattgccatactagactcaatatttttgtatgcactgttattctctttctgatgaatttgagcctgtttttcctgcttagttgcactgctaactaaatcaacattatcattattaacgggttcttttttaattattttttctaaaaacttaatatactgttgttgatttatttttttatctacgaaaataggaaatactgaactcttttttgtcgataagaattcattaaccatcgttttaacattgttttttcttattatgtctttaatgacagttttttcttctattcctacatggggttgtagtttgtatttatctatcttagatgtttttttatttattctctgatcagtgagctgtgcttttttttcttctcttcctatatataaagagttaaatcctttttttatatttatatctaaagatatttttttagttttagaaccaccagatgataataaataccgatgacttaatagcaaaccttcataattttctggcattttatcttcctgaagatcttgctcatcgttatgactggcaatattgtcttttaaactcgctatttttttaagtatatctaatttctctgctaatttttttatactttcaggtgtaagctgacatttattcaaatacctatttacgctataagactcagttggaatatcactttccgttttttcactagatagcgtcatcttatttgagttagatattccctgaaccatataatgctatctcctgtatttcattctgctctaacctttcaatatatagctctttctctaatgcttttctttcaaaataaagtgtcattttattttgttttttgacggccttttgtcgttgtttttttagcgcctcactctgtttttctaaatcattcagtttatcctttatttcttcaacttgagcgacataaaaatttattgaatgtaaaacaatagcttgcttccttctttgttgatgaaacgaatgaattgaataaataccggctttttcataagcgggtacttcactctttaaagcactaattaattgctcttgctcttttttcttctgttcagcttctgtaataagttttttatattttaattgttctttttctatttttttttgccgttgggcaatggcactaatcaatgcttgatgcttaagcggtaatctcatacatttgttctaatgtttgttgaaaatcggctttttctttaaaggattgagtaagaaagctttctatcttggcttgttttcttaccgcgatatcatttaattcgttatctccttcatgatattctcctaactcttgcaataacttaacatcttgtaatcgcatcaatatttgtcttatttttaaagcagatttttgttgtttactatcagtgacttgttgaaaaacccgactcacactacctaatacatcaatagcaggatagtgccctgatgctgctatttttcgagataaataaatatgtccatctaaaatagaacgaatttcttcaccgatcgcatctggctcatcatcactctctaataaaacagtataaaatgccgtaatggagcctgtttttgttacccctggacgctctaaaatagcgggaagtttatcaaatacagatgctggatatcctttacgtacgggcaactcacccgctgttaatgcgatatcccttaacgctcgacaataacgagtcatagaatcaataaataaaacgacattttttccttgttgacgaaaatattcggcaaccgttgttgccactaaagccgcattacacctttctaccgctgattgttctgaagttgagcaaattaaaaccgtattttcacatcgcttatgttgctttaattcttcaataaactctgtaacttctcttcctcgttcaccaatcaagccaataacaaaaacatctgcctgtgcaaaacggataatcatattcattaacatcgttttacccgttcctgcactagcaaaaatccccattcgttgccccaatccacaacttaataatccatcaatagcacgtatacctgacttaaatagtgttgtaataggcagcctatcactaaacaaaggtggccgaccttcgataggacataaggtactaaaggtcttctctgctatttctgtattaaatcgtaataagcaattccctttactatcaatcatgctgcctaatatatgtgggcctagggcaactgaaaatgtttttcctgttggctcaactataatttgtaaagagtaaccttgagcgcttcccatcatacttaatattgctatgttattatgaaacccaataacaatagcttcaccgagaatattttcactgaaaatattctcttttagttggcagacctccccaataaaaacatcacgtaacatcacttctaaaatatttccttgtattcgtaaaggatgcgctgcgttatgaaacattagaaatctggcgttcattatttagccaataaaccgttgatgtatactattcataatttgaaaatagtcatcaatggctcttgccatgctttctccattttgcaatgcaattggcataaatgatgctcttaattctaaagagtcctcaattctcaccaaggccggttgtccagggtaaaaactttctgtttgattattgatgctatctaataataattcggcactaatttgtgtaagtaatttttcatcataatcacaaagcaccgaccaaatcataggaacctcgtcaacaaccaataaattaatatctggcatatcacctaaactaatggtaatggttgaatggttatcgattgatttcccccctgaaaataaatcattccgaccaataacattcattgcatccataagtaagctagcaagatcaaaagacataatcactcctaaatagattgtaatacattaatttcaatatcagatgttatctcatcataagataataccggtatttgaggatattgagtttctattagtttttttacaaaacgccttatatctattgatgttaaaaatatataatcctgaatatatttaatatcatcaataaccatagatattttttctattatcatatctaattcagcaggttctaaattcaataatgtgccagaagaactttgtcttattccactacgaattatctcttccatatcgttagataagataattgcattaaacttcccatcggttgaaaaaaaataactaatataacgagcaagaagcgttctaatgtgttcagtaagtagcacgggatctttttctttgctcccccattgaactaagccccctataatagtctttatgtttctaataggaattttttcttgtactaatcgttgcaaaacatcatttatcctctgaatagaaacttgcctataacactcttttaaaagctcaggggcactcttttctaatttatcaaggatatcttttgtttcttgaataccaagaaactctgtaatatttaatgtgatcagatcagagaattttctataaaagtaactttctgaacgttccgctttgtaacctaatggcgctaatttagattcatcatcacgctcaatccaataatgggttttattatcatcttcaatacttattaagttaaagcctaaagagagcaattcatcattaggattttctatatgaaaaagaggaaaaggacaattaagttcttttgctttaacttcgttaattaaaataataattttatcgtcatctattttatctgaatagtgaatcacaatatctggtaataatataccatattgtaaaataaattctttttgtaaccatttttcaaaaactatttttgttaaatatggttttttcttagtagaaagagtgatgattaatggcaaagtttcagcttgtgataaggtaatattttctgttaataaactattatctacttcttccccatgtttaccagaaaataaatttgacataagtccttttttactgtcggcattagtagcattatgattatctttttcatcttctgttttatattcttttttactactcttccattttattttaaaaaagtaaacgccaagcattacagataaaataagaaaaacaggtgtgggaaatcctggtaaaaaaccgataccaaaagccaaaatagctgtaacaagcaaagcaaaatcttgtgccaatagctcattcataatgctatagcccaaattattattttcaccaccgacacgtgttacaataaatccggcactaatagagataagtaaagcaggaatttgtgcaactaatccatcccctatcgttaaaagtgtatatgtatgtaatgcctctgtaatagataaccccatttgagccatacctaccgatatgccaccaattaagttcacgaagataatgacaatgccggctatcgcatccccttttataaatttcatggcaccatcgaatgaaccatataattgactctcttgtcctaactctttccttctgatctgaacttcttcattcgtaatgatccctgattttaaatcagcatcaatactcatttgttttccaggcataccatccaaagaaaaacgagccgcgacctccgctactcgttcagatcctttagtaatcacgagaaattgcactatggtcacaatggaaaagacaacaaaacctacaacaagattttcaccaatgacaaactcaccaaatgaggtaatgatctctcctgcatcggcatctaataatataagacggctagtgcttattgataaagcaagccggaaaagagttgttataagcaataatgcaggaaatgtcataaagttcagtatacgtttaatataaaatgaactcataaagataagaattgcaatagtaatatttaaacctataagaaagtcgaccaaataagttggcaaaggtataattaacatcattataaccagtatcatcactgatagtacgataagttctggtttgttttttattgctaatagaaacttataaatcataaactttgccaataattaattgttttttattttcttaattgatattgctctttcttaatataattatctataattttttgtatcattatttggcattcatttctaaaatcatcagataagtataataattcaggatatttattgaacattgtctttaactgttgtagcaacctcatttttattttaataaaataacctttccattgattatccataagtgatattaaatatttttccatttgttctggagatatcattccattaatagttagttgataaaaatcatcttcttttataaaactctttaaatcttctttaactaaattttctatattcatttctataaagctatataataatcgtaatttatttaccttttccaaaagataaccaaactctgaactttgggagcaacttggcattaacgatttcatatcacaaatcaagctctgtgttagaaaattcaaaataattgaacatttttttatatcatatttttctatccacattttgaaaaaataaataggttcaatatccagaataatgtaactacggtaaaggtctcttaatactgatgcatctaaacaaagtaatttagcaaaggctttagcttggagagcaatattaatgcccgccttaatttgcttaccctcctcacctgcaagtaacctattgatctcattttcaatacctgcatctaattgtgcacctaatttttttttcctaagtaattctcgtaaaaccataacgagatcactaggatcagggaacattttacgtaaatattgcaataattcctgtaaacttctccccgattttctaaattgaagcatcaccttatcaagtttctcatcagcaccatcttctgcaatatataaagcttcttgccctttattggcttttttgtctaataattttcctaatcgctgagaaaaaagagttgccaccatagacatatcatcagatatttctattaattgattttgataattttcactttcgtttatttgtggttgcttatattctatgtcttgctgactttctttactaatactgttgctggcaccatttgtcgaagttgcagtattaattggtccgatcataatatcacctcataaatgcctgaatttgttttagcgcttgagatgtttttttatccatcggtaaaaatgggtgttcagttaaagagtccaatccgtgcgtatcagttttatctaataaacgcggttgtaacataaaaatacgcaccatttttttattattatctgactgatagctaaatgctcggccaactaaaggtatagcacttaaaaaaggaattttgttttctgcttttatgttatcttctcgtgtatatccaccaattaataaactaccgccttcagaaactcgggccacggtgctgatatttgtgcgattaataacaggtaatttttcaatcccttcttctctatcttcatcatcactttttttctcggcgccatcttcaagattgataatcatctcaatctcttggttagtattactaatacgaggcaacacactgatcatagtgccgaatgttgtagattctaatgaagcaactcgctcacctttaatttgtgtataaaaggtggtgttattatcaaatatggcgggggtattttcttgagttaacaaaataggacgagaaaccattttagcttccccttcctcactgagtgctttgattttacttaaaaaactaaaaccagatacagcacttaagctagcggtattaaagaaaaatgtatttttacccgagccataactcccctgccaattcacccccaaactatcggctttacttttagaaatatcaattatccataatgacaattcaacttgtcttttcggtttatctaattgtgaaataagtgagctaactaaagctaaaccttctcgactcgttttaaccaacaggctatttgatccaggtaaaggaacgagttcaacattatatttgcccatttgagtgataatcggtgaatgagtatcttgtatatcgttggtaattttatcatcctgatatttatcattatcttcgataatctcacgcgctcttctgactgttttttctttctctcccgatggcataaatagctgttgcaaaaccgttgttatacctggtaaaaccactttttcatcacgtaatatataggttctatcttgtacaaaagtgttttttaatggaaatatctgcacaaactcatcgccataacgagagcttccggttggaacttgattattgatattttcattaattttttcttgtacatcattatccaaaagctcagcagcagccttaactaagctaatataaataggaggacctgagagataaaaagtacgctgatcgtgacctgcacgtaatgggtagcggagatcatataatccaacatcttgtagatactctttcagtttactcaagctgatatttttcacttgaaatagctgttgctgtatctcattatcgcgataaatataaatagattctccgtcattaaaataaagtaatgacaaacgttttaccattaattcaaaggcgtcttcaggtgaagaaatatcaaattttccactgatccgctctttttttactgcgctgcttagaataaaaggtttatttaatttatctgatagcactaggaaaaactgttcaatatgtgtatttaccgcaacaaaaacatcaggttttttaacctgatgtgtataaataacctttccttctgcagcttgtgttggcaaaaagaagctataaaaaatgataattccaatgatacagtaaattttattttttatgttcataaagatattggccaattcgccgaaattcagttggtgtaataccaaataatgtcttaatttcattagaaaaatgagatgctgaactaaaaccattatcgactgcaatctgagtcaatgattcatctgttgatagcgttgtcaaaatagaagatgccgcacgccatgaacgtaattgacttttaccacaattacctaaataacgtttacacagccgtctaaaatgtgtccctgatacaccatatcgttcacctatttgtgcaatattgctttttttctcatccaaataactaatcagatgtaatataagccagtaactttcactgtgtcttattgtcacaaaaagaggttctaattggctttcatctttcagtgcctcattaataatcagatgttctaatgttccactcccctcttttatataaaaaatttgttgattaatatcaaaattagtgccaactgctgtcatttttgaaaaatctctagcataatcaataaatgccaataatctggcacaaataaaaaatgatctcttttcaatacgccatgactgattttctgattgaaaaataacattttcattttttgaattataaataaaagcctttccctttataattttagtcgttttatcatcgtatattcttattggatattcatcatttaaaggaatgcacatgaataataaattccctgataaaatatttttatcgccacttatttttatatcatttattaacatggtaaatacctcagcctatacttataatctattaagggttcaaaaaaacaaactatttttcaaaatgttattatagccataatttatagaacactataataatatagcctagaattaactttaaaaataaataacaattctcattgattattattaaaaaaacaacagtaatatatcaacatttattttcaaataaaacacctatgtttttttaaagaatttcattgtttatatgactaaaatatatttataacatgaattaattaacatttattattgggttaactctatgctgtattatatttatgttctcagtggtcctttaaaagggataataacgcctttgctgcctaatcaatactcattaattctacatagtaaagaacatattgaaaataaaatagaaaatgagaaattaacactttacattccttgcaacaagaaagaacatgaaaagataattacgattatgcttgatgagcataatacaaaaaataataaatataaaatagaagatggtttaatttctaaagaaattagcaaagaactaccattagaactcgataagcctatatatatcaataattttcctattttcttaattagtcataaagatgatttgtctataacatcttttgatttaaattcaaaaaaatggacaattaatagaaaaatcattgtatcatttatatttgttattgcattttttatagtatcatttacttttatgaatgtatcaaaaccattagaaaataaaccaaaggaattggcttttaaaagttcatattcaaatgaatttaaaggagaaaatggttatttatgtatttacactgaaccttactcttctaaaaatttaataaaagatagtgattcaaaaacaaaaatttcatttttgaacaaagaaaaaattatcaaattagcaactaataataaaattcacgttactttaaaagacaacactaaacctatagtgagttttttttattataataaaaatgaaaagttaaaaatcattcaagccatcaatgacaattttcccaaaaattgtcagccaatcataaaagaattatcaattgctaaaattgttgaagagataaacaagctaaatttcactaaaacaataggatatactattgaagaaaaaaataacggcttaatttttatctttgatgataagctaagcgtaaatgacaaagaaaaatttaatgcttatataaaaaaacaggcagctttttttggaagaaaatttattttttatcgtgaaaataaagttaatatcaacttgaaaaataaagcaatgctacaagaagataatggatatatttttcttgataatcagcatcgttattttcctcaaggataatcaagctatgatgagtaacataacaaatttaagcacaaaggagtaatttatggctgcgagtcttgttgaaacagatgtaagttcaattagtaaagttgaccaatattttcataaacctgtgaaaacccaaagctatgagttatctgaagccttagaagcattaaaagctgatacatctaatgccgcggcattagccgaatatcaagccaaacttgccgaatataatattacacgtaatgcccaatctacatcaatcaaagtcattaaagatctagcaatgagtattattggtaatatgcgttaacatgagttttacggaggttatgtatggctattgcacctattattcccgttaatttaaccaaagaactacaagatacaagtgatgatagtttatcgactatcatggtaaatggcattattagtagtatgcaatatgaaaaaaagatacaagaaaagttaacaacattaagccaattaggtgatgcccaaagttatacgaatttacaaatagaacttagcgattattcaattacgatgagcttagcgagtacgttagcaagaaaatctctcaatattgtggaaacactacttaaggctcaatagtaatgaatagacggtatttgttattactatttttatgttgcttacttcctttattaaacggttgtaaggatcaatcactgctcactaatttaagtcaaaggcaagcaactgaaattcaagcggtgttacagaaacaccaaataacaagtactcgtactgcgttaggaaaaggattatttgagatctcagttaaaaaggaaaatatagggattgctattcaaatattagaagaatatcaattaccaacaatttctcgtattgaaattacacaattatttccatcagatgcattagtttcatcgcctcaagctgaaaaagcacgtttaatttcagccattgagcaacggttagaacaatcattattaaccattgatcatcttatcgatgcgagagtacatgtcagttatccactatcatcaaatgatcgtataacgccaacacctcatgcttctgctttagttttctatgaagatggcatgatagatagtgatcagctaagtgacgatgttcgtgcttttatccataatgcttttaatgatatggatgagagtaatattactgttttattatatccacggaatatcaataaatttacgatattaaataatcaacttcaccaagataatacgacatcattgagtagctcttggttactcatagggttatcaataattagtttaattataataattatggtcatattgattatttatcgtcgtaaacaagtcaataaaatggtaagcgagaatgagtaatctgactgctgaacaatttaaattgatctctaatgtaatgtatgaaccgttaagttatatccattcagactacgatgtattagcatcgccagaagaaaataccctatggcaaaaaatagctaatcgtcatttaattgggcaatatcaacttatactgcatattgattgtgagattgatactaccgtagaaaaaatatttactcattggcacactcttcctcgttgtgctttatttttaggttatttttattctcgtcatacgctattagcacaaaattattatcatttagaacctgcattaaaagcctttttagctctctatcctatgttaaataggactgtcgatagcaaaatattactgtcactaaaagatattgcccccatagatattggctatcaattactatttaattttattaagctaatatcgaacgcactagctcaacgttttaaattacttttttcaccaaaatctttatcaattaatattgaatttcctaaatcacttgttttatctcctacactttttttactggtattaaattatgctacgcttgttacctgacaaccttttaaaatatacctgcgaaggtgtattaatacgagctcactatatacgacagctcgataatattcataaaacaacattagcgaccaagcaggcagcaaaaaaaatgctgcatcactttaatcataaactagataaacttcgtaataagatagctaacgaagcttatgctaaaggattacaggttttattagctgatataataagattctcaattgaatatcaagaaaaatttgtacaatatgaatttcagcaacgagaacaactcgtcgcaacgatcggggaattcttagattcacctgaaatacaagttaaactcactcaatatctgatgtcatctgttcctcttgagcaaaaagtaacactcgatattcccacaacactacagcgctattttgagagtgaactcgacaatagcaatattaagttaaactgccataacaacaagaccattgctattcataccggtgatcaaattactttttttgatcctgccatatttctcaacgatctaagaacacaatttcatcggcctttttctgaaacttatcaaccgatttttgagcaaaacatcaaacaactgctattaaactttatcaatacatttaccccctcagacgatctttcttcaagaaagccaattttaaacgaggataacaatgaaaattgatcctttccgcgcacagcaggtatataactctccttcgactttatctagtgctaacaatatttcgagaaaaggatcagatcctattatcgaaaatttgaaactgactttttatcaagatttaagcaaagcggatcttagccatgctaatgatattcttactttattagaccaatttgatgtcaaagatggaggcaatcaaacgttaaaagagaagcgacaaatagccttattggtttatgctcaccaacaaagtgaattagaacatcatgaaaataaaaacttgattaatcaagcactcgtttcgcgactctcttatcaaggtttttatcatcaagtcaccctagaattattaggtatgattgataacaatgatgaattcgaaggtttttttaagcctgatagggtgacattttcattgtgatcataacatttgagcaccaggccctttttcccctaaaatatcatcagggttacgtaatgggcaatcatttaatgataggcatccacagccaatacagtgatcaagtccattacgtaatcgcttaagacgccgaatacgctcatcgagccgtattttccaatccgttgatatttcatgccattgttctgcagttaatttactatttggtggatatttccctaatatttcctgaatttcttttaatggaatacctgtactctgcgctgctttaataattgccacataacgaagtaccactgacgggtaacggcgctgatttccagggctccgagaactttttatcaatcctttttcttcataaaaatgcagtgtagaaatcgcaacaccactgcgttttgccacttcgccaaccgtgagcgctcgattaaaatctattttctctttactcatttgctaccttttttatttttcacttgacctcaagttaacttgaggttttatagtcttgtcccaatacaaagtcaagtcagccaattgcctgattttatttttttaagtttattgaggactgatacatgcctaactcaattgcacgtattcttgaaagccaaacattatggattgtcgcaagagtgctaattctattgttatttttatcatcgggttttgccaaggtatttgattatgagaatagtttggcagagatgcgtgcagcagggttaaaccctgattggttttttaatctcgccagcgccattgttttattcgccggatcgattttagtcctttttgatcgttacctatggttaggtgctggcgcattagccactttcttatttttaaccattgtgattgtacatacgttttggaatatgaccggcgataaagcgatgttatccatgtattttgcgatagagcatacctctgtgattggaggactaatggcaaccgcaatggctagccacttcagagcattatggaaaaaattcaactcataacaccctaaaaatagataaaaacttcactatgggatcggcggtaaaatgaataagaaattgacgttaactttatgtgcctcactatttttattaagtgcaggggcaatggtttatgcaacaatgggatctgatgaagatgaaacacagccatttgcttatccaccaacaaaagtggcattagcaaccgcgcaatccgctgaattacctaataccatgcatggtgttggagaattggaagccgctagacaagtctatttagcggcagaaacaaatgggcgcatcgccacgatccactttgcatcaggacagaccgtcaccgcgggacaaatcttagtaaaattaaatgatgagccagagcaagcggaattattacgcctacaagcacaactaactaatgcagaaaaactttattcaagaactcgccaactttatagtaaaaatgtggctgcagcagcacaattagatagtacgttatcagagcgcgatatgattgtagcctctatccgtgaagtgaaagcgcgcattgcacaaaaaacaattaaagctccctttgatggtattgtcggcataaaactcgtgcatgaaggacagtatctaaatgctgaggaacgtgttgcctcattagtggatgcaagccacttaaaacttaacttttcactcgatgagcaagtggcgccacagctttcaactcatcaacctattaatattgcagttgatgcttatcctaatcaaacatttaccggctcacttaatgccatagaccctcttattggcccttctcgcactgtgcaagtacaagccattttaccgaataccgataacaaattaaaagcgggcatgtttgctcgtgttcaagttacctcccctactcgtcatcaggcattaaccgtaccagagacagcggttacttatactgcctatggggataccgtgtttgtagcgcaatctgacaatcaaaaaaaccttatcgctaagcgtgtctctgtgaaagttggattgcgctacaacggccttatcgagatcaaagaaggcttaaatcagggagatcaagttgttacctcaggacaaatcaaacttagtgatggcacctcaatagcccccatagagcaagatacgttaacactggcccaatctactactcgtcaaccataacaggagtgtttcatgaaattcactgatatttttgtgcgacgacctgttttagcgttagtagttagcaccttgatttttttactgggcgcatttgcgttcagtaaactacctattcgccaataccccatgttacaaaactcaacgattaccattgcaacagactaccctggcgcatcgtctgaactgatgcaaggttttgtgactcagcctattacgcaagccgtttcctcggtggaaggcgttgattatatttcttcatcttcagtacaaggaaaaagttttgtcacggtaagaatggagttaaatcgcgatccgacacaagcattaacgcaagtgatggccaaggtcaatcaagtacgttataaattgccagaacaagcttatgatcctgtgattgaactttcttctggtgaatcaaccgcagtcgcttatgttggcttttccagtgagcaaatttctattccagaattaactgactatctatctcgtgtggttgaaccgatgttttcctccattaatggggtcgccaaagtacaagtctttggcggacaacaactggccatgcgcgtatggctagatactgataaattagcggggcgaaacttaactgctagtgatgtcgctgatgccattcgccgtaataattaccaagcagctcccgggaaggtcgaaggtgagtttgttattgcgaatgtttatgtcaataccgatttaaccaatgtggaagaatttaaagatatggtgatccacaatgatggccataatcttatacgtctacgtgatattggcaccgtcgagctaggtgcggctgctactgaaaccagtggcatcatgaatggcaaaaaagccgtcttcttaggcctatttccaacaccaacaggtaacccgttaatcattgttgatggtattcgcgaaaaccttactgatatagaaaaaacactcccaccaggtgtaaatgtggagctggcctttgaaacttcacgttttattaaagcttctattgatcaggtggtgcaaacattaattgaagccattttaattgttattgctgttatttatctctgcttaggctcattacgttctgtaattattcctgtgcttgctatccctttatctatgttgggggcagccggattaatgttggcatttggttttagtattaatttgcttactttactagcaatggttttagccattggattagttgtcgatgatgcgatagtggtggttgaaaacgtacatcgtcatattgaagagggattatcaccagtgcaggccgcattagtgggggcacgagaggtcgcggggccggttattgccatgaccatcactttagccgccgtttacgcgccaatcggtctcatgtcaggattaacaggtgcactgtttaaagaatttgccataacgcttgctggtagcgtcattgtatcgggtattgtggcattaaccttatctccggtcatgagctcattaatgctcaaaccgaaagaaaatgaaggcaggatggctaaaatagccgaatatacctttgataaattggcatattactatagctatttgcttaatttttctttaactcatcgctggttaaccgtcgttttcgccttcgccgtgtttgttagcttgccgtttttatatagccagacaaaacaagagttagcacctttagaagatcaagcgagcgttttaaccgcggtaaaagcaccacaacatgcaaatcttgcctatgcggaacatttcaatcagaaacttgatgatatttatatgagcctaccagaaacagacagcacatggatcatcaatggtactgatggcccttcagcaagctttggtgggattaattttgatggttggaaaggtcgtgatcgtaatgccaatcaaattcaggcagacctacaaaatcgtgttgcggatgttgaaggaagcagtatttttgcttttcaattagcatcattacctggctctgtcggcggattacctgtccaaatggtgttacgtagcccattaggttatcccgttttatttgacacgatggaagagatcaaacagcaagcacgagaaagtggtctatttgtcgtagtggatagtgatcttgattacaacaaccctgttgtacagatcactattgatcgtgccaaagccaatacccttggtattcgcatgcaagatattggcgaatcactatccttattagtgggtgaacactatatcaatcgctttggtatggatggtcgctcttatgatgtgatcccccaaagtatacgtcaacaacgtttaactccggcagcacttgcagggcactatattcgtactcaagataacctgttaattccattatcaaccgtagtcaatattaccactcaagttgaacccaataaattaacgcaatttaatcaacaaaatgccgctatatttcaagctattccggcaccgggtgtcaccatggggcaagctgttgcgtttcttgaaaatgtggcaaattccttacccgctggctttagccatgattggcaatctgatgctcgccaatttacccaagaaggaaataccttagtctttgcgtttattgccgcccttatcattatttatttggtattagccgcacaatatgaaagcttggttgatccattgattattttgattacggtaccactctcaatttgtggtgcattagtgccattagctttaggtatggtgacattaaatatctacactcaaattggtttagtcaccttgataggacttatcagtaagcacggtattttaatggtggagttcgctaatgaattacaagttcataaaaatctaaatcgacgtgaggcgattattgaagcagcaaaaatccgcttacgccctgtcttaatgactacggcagcaatggttatcgggcttattcctctgctatttgccagtggtgctggagctaatagtcgctatggattagggttgattattgtatcaggtatgttagttggcacgctatttacgctgtttgtattacccacaatgtacagcttcttagctcgaaaccatcaagtcagcgctcagactgagcgtcaaaaacaattacagcaaatcagtgagcaataaaaataacaagcgctaatgtcgtaaacccatccccattgtaaatacaatggggatggttatagttattttttgaataaatattattttatttcaatattatcattgactaaaggaatgttatgatttattgcaaacttaatcagctcatcaacttgtgatttccttttaagtacctccctactgcgattttcccttaaatgaacgagaatactttctaagctttttgtttttgtatttcctgcctctatcattttcatcatttccattaaagcaataaactcccctgttcttcctaatcccgcaagacaatggacagctatattttcttttgttgggtttattgttaattctttgccaatcaaatcaattgtattttttaattttgtcgcatctattgctgtatgatctctccaattataaatatgcacaaattttatatttttcttttcatcacaaccttttttagttaatttattaatatatactttgcaatctaaacttctttcatttagtaaaacttcattatctccatttttattttctataaatttcccatttttaccttttattttaaaacgactgaaatcccacttattaaagtggcgagattctatattatctgaataaaaatcctctctaaagtatttaaaccctttctgcttagaattgcttttatcatattcactatcaggttttgagaagtcccatttaatatccttattcgaggctaaaacataaactgtctttatatcattatcaaataacatattaaaataatgttttaaactctctttatcattaagaggatattggcttgcaatagtcgtataaggagagttcttaacactcacattattagtaggtaataataccccattagattctattaaagtttttttacaatatcgtactctatatctagaattaggtacacattgataattattttcatcatattgaggtgagttttcattataatataatttgttaagaacttctgtagatactaatctttggatattatttacattattgatattttgtcgcatacagagaacaggtgcttttttttcaggtaaatcttttgtataccatatagcactactattcttaacactactgacattaagatttcccgtgggatcttttattcctaaaaaatttcttatgctattaatttttgcacttacattaggtattattcttatcatatatcacccttttataacttagttttacataacagtctcctaactttatattgataaaaaatttaaaatataaaaaaaacatcttttatcaatcatgttcattttaagaaataaatataagtgaatataaaaatgccaatattgttgaataacatatcggcatttaaaattaaaagaaaatttagtctcttgtttataaacttatcttacatcgttgaaaaggtattcataattatcccaccagagataatcaatgccattgagaatatagcgggtagatcgggtttttgtttatataaaatcatggcaactaatgttaccccaacaataccaaatccacaccacaaggaatatgccacaccaacagggatatagcccattgcacgtgttaaggcgaaatagcaaatacagtaagcggcaatcactaaaacagagggggctaatttactaaagccattggtctttttaatcattgaggtgcctgtgatttcagaaccaatagacagcgccagccataagaatccggtaaacataatggttatccttatttattttaataaagtacttatttattaaaaaatagttttattaaatatagattattaagaaatagatttatttattcactgacgagcagtgtgttttatattcgataactccgtcgtttcttctggctcttcttcggaacccattttcgaaaacagattcataatgacgatcccgctggcaataactgccataccaataatagcagccgtatcaggatgttgaccgtaaaatgccatacctaaagtagatacaactaagataccggttccggaccaggtggcataagctaagcctactggaatatttttaactgcacgagataatgaataataacaaacaatataaagaacaataattaatcctaataataatgtctttgttattccttcactattatcaaacatttttaaggtcgaggttgctgaggtttctgaaataataaccgccagcatccaaagccatgattttgcttttggggacataataagactcctaaatttttagatatggtatattttaatctttcaaactttttaaatattcaatagcagaatcggttaatttatcttgtgataattggtatttttcagggttactcattacttgtttcaaagtaatatagcgattattattcagttgttttgtttccgttttattaataaattttaacttgtgatcaaaagcattcttttttaagttatcttcaacttcatttattgagcaaaaagtaatacccattgatattaatcgttcaatattctgttttagcactaagttatagtgttcattttggtttaaacctaaaatttcattaatttcactgtttggctgacaaaagtaaggtaatgcaataataggaatatttttagccaatgcggaatgaataagtgttccttcttcactaatcattaacccattaataatttcccccaccagctttttgtcaaaatagggaataaataatgcctgataagcagataacctatggggatcaaactcatcggctttagtgatatcccctacatggcaccactgcgataaatcatggcattgctgtgcctgtgtggtaacaaaaatagaagcccgtacagtggaaaaatggctaatgcgttgatagatttcatcacgatatcccggcgccggtgttaaaactaacaacaccggcttttttatacacttttctatttctgcaacaatccgttcaattaattgattgtccattacctcacctcattgtcttagctgacaataaacacgctgtcgttatttctaactcctgccgcatttgcctcatcggtatcaatatgaaattccaatgcaaatttatcactgacgcgcacaatcacttcatcaaaaatcaggctacgttcaccctctgtttttacatgcactttctgaccattggtcacatttaacgctctagcatcaatattattcatatgaatatgacgctgagcacaaatgacttgctgttttaattccacatatcccgcaggccccattaaaaccgcattaccggagcctgccaaatcaccggaactacgcacgggtgcctttatacctaatgcaaaacaatctgcttttgaaatttctaattggctttgtggacgaaccggccctaaaacacgaactttactgatagagcctttaggcccgactaccatcacacactctttggcggcaaattgtcccggttgttttagatctttaaacggggtgatctgatagccgtgaccaaataacgcatctacatcttgttgtgaaagatgtacatgccgattagaaataccaacaggaatagcgatcccttgatttatgcccattcccacattggggatatttaaacgagtgagaatttttcccattagttgttgattaatcattattttttacctttacggctttcaggtttactctcttttttactgcttggtgctttatctgctgtcattgctttagtttcaggggcactattttgagccagtctatctgcaacttcttttgtcgcgtcactatctccactttcgtgcttcatgacagtttcaaccctgttttcagccagcgttttgagtgcattctgttgtgtttcttcactaataacagcgctttttttcttaccttttattgtcagcaatttggtgataacacttggctctggtcttgctatgacgagtgatccgataaccaactctttttggctcaccacatctacaccatgctcaaccgctgtttttaccgcactgatctcaccttgaaaacagacagaaactaaccctgatccaatttttctataaccgataatttcaacactggcagctttacaagccgcatcagcagcttggatcgcagcggttaatccgcgtgtttcaatcacacctaaactgttcatctttctctcctactgattagtggcggacaagacggatctcaaaatcaaattgtttaaagaaggcttctaagcgatcgagctcttctggcgtatatcccggatcgtttttaatggggtagatcatctccaatttttggtatttattacggccaaattggtgataaggtagaatatcgatgcgctgaagattaccgcgttttgacaacgccatggcgtagttaatcgcaccagtaatcgcatcataagagtcgttataacctcgcactaaaggcatacggataaccacatttgcaccgagatccatcaaacgctctaaattacggcggacattctcattaccaatgccaaataatgctttatgctgagtagtatcaatgtgtttgatatcaattagaaactgatcaacgacttgcgctaatttttcataattagccacattagtggttgcttgtgtttccaccgcggtattgatcatcatctttttacattcacgtagcagagctacagcaaaatccgtttgtaaactcatttcgccgccaccgattgtgacaccaccgccggaagagatatagaagtcgtaatcttgcatgataatgtccatcaattcagatacagagacatctttacccataatatccagtgcatcagaaagacacacttcttcacatttacggcatccaatacaatcaacggcacgatcaacgcgatgaacttgctgcccttgctcattggttgtcatgtaatgcacacctgccggacacacatcaacacatttaccgcaatccacgcatttatcgcgagagtacatcacctgaaattcactgctaagaccttctgggtttgaacaccaagggcagcggatattacagccttttaagaaaaccagagtacgaataccatcaccatcataaatagagtatttttggatattaaatatccgccctcttatttctgctgccgtctccatctttacgcctccaaatctgcatcaaacatccttgttcgataaatttacatcttgtcttgtcgcgattaatagggaggactcttagccctccttaggtctatgatcagaatttctcaatcactgtacgactaataatttcatcctgaacttctttacataattcaacgaagtacgcactgtagccagcaacccggacaattaaatcgcggtacttttcaggctctaattgggcttttttcagtacttcattatcgacatagctaaattgcatctgaccattacccaaaatagaggcagttcttaataaggtaattaatccttggcgtccttcattggtatctagcaagcctttgaggaatttaaagttatgaaccataccgatattcatggtttcaacattcatcttgctgatggatttaatgatggcagttgggccatgtttatcggcaccctgtgtagggctgatcccatctgataatggtttccatgctaaacgaccgtttggtgttgctgcggttaattcaccaattggcgtgttattagagatagataacgtaccgtgactaaatgtggagtagagcattttatatttacggcattcacgttcagtccattcggtaatgtctaacgcatattggtcaacaacatcatcgtcgttaccaaatttcggtgcatttaaacagtcacgcagtaactcttcgtgcccttcaaaattagctaataagccgtcacgtatttgctctaaggtatattttttgtcttcataaaccagtttgcgaattgccgccatagaatcgacataagtggctaaaccagagaagatcagacccggtccgtggttaaccatcgcaccacccgctgtcacgtctttaccttgctccatacaaccttcaaccaatagcgacatgagtggttttggggcaatgtcacggtgaacgcgctggctgataaccgtaccaattgctgataaacgaataatatgtgcgacttgctctttaaccgcgcgatcgaaatcctcataagtacgtaaatcacgtaaatcgccggtgtctaagccttggtagctatcaaacagcaccatacgaccacgatttaatacaaattcaatggcaattggccactgggtataacccgttgatgtccattgatagatacgacctgatttttgtggttcaacacagcccatcaagcagtaatcgcgtgcatcttcaaagtcgaagcctttgcgcaacatcatcttgatatgagaatcatcgaagtgacaggcagggaagcccattcccgctttgaccacatcaacgattttttccatatattgctgtggtgattggttatggatacgacaagccagcgaaggttgatacactttcacaaagcgtactgcgtccataatcaagtaagttaaatcgttacaagcatcgccacctgagcgtttctgtccccccaccgttaagttgataaagggttgataaccggcaaaatattttgcgccaagttcactagacatccacattaattcggcacatttgatgataaaggcctgcatcatttccagtgcttgttcacgcgttaaacgacctgttttaatgtcgttttcatacattgggaaacagtattgatctaagcgacctaaagaaagtcccgtttggttctcttcaacttcaaacaatgattctacagtccagatactttgcagtgcttcttgcaatgtttttggtggattagcaggaacattttcattgacttgagcaatggtcaataactcttcacgacgttgtggatcactctctttagaggctaattcacgggcatgctcggcaatacgatgagcataagcgataaccccttcacaactttcaatcgacgctttatagaaatagatacggtcaatatcagcaggattttccatgcttaattcagccaatttcgcttgtgcatcggctttaataccgttcatccctttggtgaataacaatacgtcataaccggggcaagtatcaccaccaccattaatttgatgataagagagatcgctgacaaaggtttcgccactgaattcccatacacccgcttcacggtattgcgcttcacaaatttcatctaaagagcgaccttcccaaaatggcactatctcttcacgaatgacttttttgtcttcttctgaaatttggaatggatcttgtgggcgcgtgctcatggtgtcgagttcatcacgtacccaacgccatgcgatatcaggagagaaagcgccagcacgcggtttcccacaaggatgtcccacaataagctcttcatcttgaattaagataggtgcggtttcacaagcacggcggaaagctttagcacgcaataaaatagggggtaaaccaggattattgcgagcaatttcagtaaaggctaatgctctataaattgaaacactaggacgagcctctaaataacgattacgcaggcgctgtagacggggagttaagccttccattacagtcaactcaccatttgctgtcgccggtgtaacaacattggctgaaggtgaagcatattgcggtggtgtattcatacgaccgttatataaacggacttgtagtgaactgtgtaatgctgataaattagcgcgcgctgataacaacatttctgaaagttcgttaatactgacgcgaggatcgttaatatcgataccttgggtcatggcatcaaacatcggatagccatcgacttctttcgttgcgcgcacttcggatagctcagccagttttagccaaagactttcaacaatctcataagcttgtgctggcgttaaacggccttggtcaatatcacgttgatagaatgggtatagtgctttatcaaagcccattgggttgatagcgtagctaccattctccagatgaagaataagctgtaataaatagaaaacttgtaccgcttctttaaaggtttctgctggtttggcgggtactttacgtaaaatagccgcactttctaataattcagctttacggtatggattaccttccattgcggctaaattttctgctttagctgacagtagttgtgcaaaataaagtgccgcatcacatgcataaatcgccgatttgcagaaattggcttcatccatactgctacgatttaccgcactaccaatgcttctcattctatcttcaagttgtgctttgatggctaagaaaccttgattcaccaccagcatataatcaggtgatgtaacgctattattgatacttaaaaagcgataaatagagtcactacgcacttcttcttcgctgtggaaaatcgcaccacgtggtgttgaggattggctaccgataatgagctcatcttgagcgatatagcttggaaaatgacgaataaactgataaaagcgttgtgcaggtttaatcgcttggggcacaccggcaatattgttatctaatgaatcaaaaatcgtcgcacgctctgtgctaatagaactgttacgtgaaactaaacgttctgccagcatttttacgcgtggcgtcaaagaatatttggccatgtgaggctctcctgatgttctttactagacctaatcggtattaattgagcattaactgtgtgatacaccggcaaatgcctgacgatacaatgtttctaattggtgtgtgtttacgtcacgcggatttgtcggcgtacagctatcgcgtaaagcctgtccgaccatttccgttaaacgggcataaaagtccgcttcactgacaccggtatcgcgaatactcttcggcataccgatttcatctttcaatacattaatggcgacaataaggctgataacgccttcttttaccgtctgcgcaggtaatcctaaactttgggcaaggtaggcatagcgcttcgctgcttcgctattacaatcaccatgaagattggcattaaaggcaataacatgtgtcatcaataacgcattcgcacggccatgagggacatgaaaaacaccgcctaatgcatgggcaagactgtgtgtaatacctaacgacgcattagtaaatgccatacctgcgatgcaagatgcattgtgcattttttcgcgagcaagtaagttatccccttgatgatgacaatcaagcagatggctaaacactaatttgactgctttttctgccatcgcatcagaaaaatcagatgtagctttagacacataagcttctaatgcatggcaaaggacatccatacccgtatcagcggtaattgcaggaggtacagatttcacaagttcaggatcgaggatcgcgatatcaggcaacataaactcatcgaccaataccagtttttcactgcgtgatttgatcactgaaaaagaggtcacttcagagccagtaccactggtcgtggggatcgcaataaactgcggtttacttctactgtgctctttacgggtatgccagagggagtacataacggctttagcagcatcgataacagatccaccgccgagtgcgataaccaaatcaggataatgggcatccattattttcataccactgacaatggcagaaatatcaggatctgatgcaacatcatcatagatttgaaactcaatacctcgttgcattaatttttcagtgactttatctgcaaagccaaacttcaccattgctttatctgtcaccacaaatgcgcggcgggcagttaacccagagagaaaattcagtgcattggtgccaaactgaattttgggttttatcagaaactcactcatgtcgttattactccttactgtcccgataaaccttctcaacaatggcaaccacggacatcgccttgtaacgatctttgtttagtgcgaagtattcttcagccaacaccacatcgttgatacctgcacccacactatccactgcaacataggttttatttttcagtggattaagctcatcatctaaggtcgctatcattaataaattgcttcctttcagttcagggcttttttgtgtcgcgactacgtgtccgattacctttgcgaggatcatggtttatatcgccttctatcaatgagttatttacccagacgtccgagaacttctttgataatgcgctccacgttctcttcggtgatctcaccttgctcaatcacttgttgtgcacacgcactgactgtcgttgtataaggggacgcgccaaagcgatcatcaccttgtgtttgacgttgtgctgttgcacattccgcatgaacaggggttaaagaaggtgaacgaaaacgatcatcatcaagaatgctggtgtggtaatttgcgctagaaacagcaggttgagcagcttcttgtgctaatggacaaggttgttttaactcttcaacactacgtaccccataaccgactttacgaatattcagtaaattcatcgggccgacgttatctgagctagaaccaccgcctaccgcaccacaacctagggttaacgcaggagtaatattggttgttgcgccaataccacctaatgccgccggagtattaattaaaatacgattaacgggtttttctaaagagaactgacgaataacatcttcattttgggtatggatcactaaggtatgacctaagccttcgttagtgagcaattgcaccacacgatgacaggctgattgccaatcttcttcaatatacatacctaagattgggcacagtttttcccgtgaatagggattcttcggtgaaacagtatcttgtagtgcaatcaagacgcgggtattagcaggtacagtaaaaccggcgcgctggcttaaatagatagcatctttaccaaccaccgcaggatttatcgtgccattagcgcgcaataacatagaagcgactttcgctgcttcttcatcattcataaaataagcaccttgcgctaatagctcacggtgaacttcgttataaatacaacgttctacgatgatggattgctctgaagcgcagatcacgccattatcaaatgttttactggtgatgatatcgctcactgcttttttgatatccgcactacgctcaataaaggcaggaccattacctggaccaccactgatagttggtgtgcctgatgcataagccgcacgcaccattccttcaccgccagtagctaagattaatgacacatctttgctgtgcattaattcttttgtcgcttccaatgtcagcaatgtcacaccatcgacaattccctcaggtgctcccgcttctagtgcggcttttttgacaatttctagcgcgcggaaactacactgtttcgcattagggtgcggtgaaaaaataatcgcattacctgctttcagtgcaattagggttttatagataatggttgaagttgggttagtggaaggcactaacgctgtaataacccctaaaggtacccccacatccatgacttttttcactttatcgtcattgataatgccaatggtctttaggtctttcatatgttcatacacacgcaatgacgcaaaggtatttttcagtactttgtcttgccatttaccaaagccggtctcttcgctggccatttttgccaactcttctgcgtgacgagcagcttcaaatgcaatgtgtttgactatattgtcgattttttcctgcgaaaatttcgcatattgttgttgtgcatttttcgcgttacgaactagctcgcgagccagttgtcgggattgcaaatctttatctaatgcaaccatgttttcccccatacaggagttaaaaatttagctgaataacgttttttgcttggcagcacctgaataatcaggctttatgttgctctgcaatcttctcgatatcgttatgtggtcttgcaataacacgagaagtcactactgtgccgatacgttttgccgcctcaacaccagactcaaccgctgcattaactgcaccgacatcgcctttcaccatggcagtcactaaacctgaaccgacgttttcataaccaatcagttccacattggctgctttacacattgcgtcagcagcttcaatgcaagcgactagacctttggtttccactagaccgagtgcttctttcatatttatttccttcgttattcagtcactttgtactgggcaacgattttttgaatatcgttatgtggacgagcgatgactaatgaagtgaccaccgtacctacacgttgagccgcttctaagccagaatctacagcggctttaacggcacccacatcgccttttaccattgcagtgaccaaacctgagccaacattttcataaccaatcaattcaacattggcggctttgcacatcgcatcagcggcttcaatacatgccactagcccttgagtttcaataagtcctaatgcatcacccatacgttctcctaaggcaaagactatgccttgtgtttgataacaattttgttgatgtcattgtgaggacgagcaatcacaagtgatgtgacgacttcacccacccgttgcgctgattccacacctgaatctaccgcagctttcactgcccctacgtcgcctttcaccatcgcagtcacgagacctgaaccaacgttttcataaccaatcaattcaacattggcggctttgcacatcgcatcagcggcttcgatacatgccactaaccctttagtttcaatcagacctaatgcatcacccatttttatttcctccaggaagccgtttaacggtttacagttacccatcatgtctgcgtggtgattttttaaacgcagaccttggtttcaaattcactataacggctaaaaataaaaacaacatataaatccataaaagataaacatatagttttatattctgatatttatgcttatttagccttatttttatttatctatgctgttaattgcttttttttatctgtttaaatttataaaaaaacacgcaaagaagatgaaaaaaaagacaatttaagtttgttagaaggatgttgaaaaggtgcaaaaaggcagtacaaatcagcgggaaagatgtgcgggatatcactaatatttcaatgccagctcaaggatgagaaaaagctaaatctagtctatatacaaaaagtgctatttctaggttagccctttatgtcttaagccgaactcatcatgcagcgtccttagcaggcataaatagtcaatgtttccgtcgatggggggacagtatgagagagggaatattcgcaagaatacgtcgcaacgctcgcccaatatttattgagcgagaaagtaatgtggatttttaatcgaatttactgccgggttttaaggtacaaatatagagtggggaattgagcgaactgagtaataacgttttttcatttagcttttgtgcgttaataaataatccatcatgactatctgacatttcacgcataaaataatcaaaaataacatcgggagactcatcaatcgaggaggcactagactcccattgactgacaaaatagtgacgctcggtgggggaaacccgctttgtggtgtaatcaaatttcacataacgttgtaaatagagccaacccgctttagaggtagtatacccctcaaccacaatagagcctttgccattagcaccaaaagagaaatgaatattgccattcacattctcatcttccatattttcaaagcgcataatgccctttgttgaacaaaccatcataccttcatttttgatagttaataatcttgttgctgcataagtggcgaccaagataaaaatcagggccgataaaaaacataaaagtttccctgagattttcattagtatttccaagaatagtaaaagtaattatcgcaatagctaaatggattatcttcgttcttagcgcaatgcgctaaaaagacacgccctaagccattagtttgtaatttatcaccatagaaaaaaacaaagcgctcccctttcacacactgtaaattaagcttctttcttacagcgtcaaaattgcgaatataattatcactgacagaggagttaatcatggcctcgttagagagtaattcacaatcattatgggtgagaggtgttaatgtgataggctttgattgatgctgatttaaaaagatgatcaccacaagaaatatggcgccaaataaaaaaccaatactggctaaataccaacaaatttctggtttttgtggcgatgttgccgataattgaggctctttttctaattcactgtctagattatcaggctcggatgataatgatgtctcaatgggtgatgttgtattacttttatttgcttcaccttcgtgatcatttgtttgcgtaacaggtaacagtgttgagtcatcaattaattcaacagagatatcaggattaaactctagtcgccctttggcgatagtgacaataatattttcaataccataatgacgaaatgttttacgcaataaacttaaatattggtttaaattactatttgaagaaactagcccattgtcatcccacacgcgttttaatacttcatcacgatttactacaccgggattttgaataaaataaaagagtaacgcattagcggtaatagacagatgtgtatcaacgtcacctttttctaacgatatcgcgccatccgttgcgtcgtaataaattgaggcatttattctgtatttcattgtgccctcattcatcctaattaacatgactgatttgctgtgtcggccatatattcaaatgtcatttttaataatctttcaactaatgcactacgctcttgttgtgaaatcgtagggccttctgtgagttctgataaccaaaggccatcggcagcataacgaattaacgtacctaagtagctattatcaagtttatcgcctttggctaaatggcctaacatccaatcacgccaacattgacgcattattggctcgttaggcatagctaaagaaagtattgccaattggcggctttcatctgactgtttgagatcagaaatataggttaaataagcgcgagaaaagcgccctgcttctatcggatcgttggccataattaacgcaattcgtttatccataataccgagtaagcgtttgaataccgcctgtatcagttctatcttcccaggaaaatggtgcaataatccgcctttactgacacccgcttctttggctacggcatttaaagataaagaagcaattccttcattcgccacaataatacttgccgcttctaataactgctcttggacgcggataggatctttttttcggtgatgtgcggttgtattcatgcgtaggataataccgaccagtcggtatgttccttattgatcaaaatcaagcactattagagtgagccttattatatgccaataatgttgtcaacttcacattactttatttaaaaccaaatttaattttaaataataaaattattttatatttttgatctcaataaaatatttaattaacaacaaaaaaagagaacttgataattatcaattaaaaataaggataaatagtcattaagatatttcaataatgtggtaacgcaataaaacacactttctctcatagagaataaattaaacacccctttaaaagatcgattatttgtttgttttaaaataaaaagccctctttaaatttaaagaaggcctttctattattaattaaattactattacttaatcgttattaattaactattattaataacggttaaaaactggcgtttaatgcttgttctagatcagcgataatatcgtctatatgttcaataccaattgaaagtcgaattaaatcacgagaaacccccgcgcgttctaactcttcatcattgagttggcgatgagtggttgatgcaggatgacaagccaaagatttagcatcaccaatattgacaagacgcacaatcaatttcaatgcatcgataaatttcgcacccgcttcggcaccgcctttgataccaaaagagagaataccagcaggtttacctgacatataacgtaccgctaaattatgctccgggtggctggttaaacctgcatatttaacccagacaacttgaggatgattttgcaaatattcagcaactttttgcgcattttcagtatgacgctccatacgtaacgctaatgtttctagaccttgaagaattaagaaggcgttaaatggcgaaagagcggctcctgttccacgcaatggggcaacacggcatcgcgcaatataagcagccgcaccaaagtgttcaacataattaaccccatgataagagacatccggtgtattgaggatttcaaaacgatctttatgttcagcccaaggaaatttacctgaatcaacgacgatcccaccaatagagttaccatgaccaccaatatatttagtgagtgagtgaataataatatcagcaccatgctcaaaagggcgacataggtaaggcgttgctaccgtattatcaacaattaaagggacaccatgacgatgagccacagtggcgagagcttgaatatcaacaatattaccacttggattagtgatagattcacaaaataccgctttggttttctcatcaattaacgcttcaagtgccagcagatcatcatggggggcaaaacgcgcttcgataccgatacggggaaaagtgtgcgccattaagttatatgtaccgccatagagcttcgcaaccgacacaatgttatcgcccacttgtgcaatggtctggatagcataagtaatcgcagccatacccgatgccacagcaactgctgcaatccctccttctaaggcggcaacgcgttgttccaatacatcattggttgggttcatgatacgcgtgtagatattgccaggtacttttaagtcaaatagatcagcaccatgttgcgtatcatcaaatgcataagaggtggtttggtaaataggcaccgcaacagctttggtggttggatcaggtgaataaccagcgtgaacagaaagtgtctcaagtttcatagcaatccctttgttcttatcatataggtagcttctaaatagaagttagatcttttaacttataagtaatatagataagcggatattagccttgtcgcatagtgaaaaaatttcaacttataccaatgagacttttttaaaatcgagagtatttattcaaatacccccaattggcacgaaaatttgacttaagaaccctgttttacattcgatttgctcgtttttggcatttttgtcattttttgacgagtcgctaaccaacaaattaaagagccgcctgtcaccatcataacgccttgccaaaatgaaaaagagagtgctgtagagagtagtagggatgaaaaagccgtagaaattaccggagtaaaataagaaagcgtcgctaataatgtcacattaccgctgatcattcctgccgtccacgccgcattagctaaccctatcgcagccccagtaataagtaacagtgagatactttttacattaaccacccactcgattggagcagaaaaaatatattgcccccaaagtgccaatgctgttaagaaaaagaaaggcacaataccattgtgcccccccgaaataagacgagtcacattactgtaaaatgcccataacacggcgccgataaacgccaaaatataactgagaggattacgacaaatattattccataagctttctattgtcagtggattatcaccactaacaacccaaacaagcccactgaatgagcataataaacccacaatcaataggatagagaatcgctgtttatttaagaataccgctaatgccagtgtaaagctgggccataaatagttaaccatgccaagctctatagcttgtgctctatcactagcaaatcctagcgccagcgataaacagatttcatagctaacaaataaaagtgccccccaagcaaggtaacgcttaggaaaaagagataacttaggcacccctaagatcaaaatcaaaaatagcgttcccgttgtgtaaatcagcgcagcaccccctaccgcaccaaaatactcactgatattgcgaattaacccaacaatggtactccaaaggaatatcgccacaatgccatagagtgttccttttgatgtactggatatcatgtttataccttcagatttaagtttttctctatatagccgatagtaaaacagaatcggggtaattgcttgaattactcactccctatagaagaagcgcactcgaaaatgaaacattttgttacaattaatatagcaaattaaatatattgatttactcccaatacgagtaataaaagtatcttttatttttatacgataaaaatacgctttgtaatttccaataaaaatgaataaacaatatttctattttatttacaaataataaatttttattttaaaatttacttaaatgccccctttcagcgtgcttttttacttaacaaaaagccatttttcgtttcattttataaaaaaactatccataaaatacattttatgaaacatcatcttataagtataagtacgctatctttttacgatgcaccggataaatgatgagatagatgtaataaaatcaaataaaaaaccaaacaatatcaatcagataaaaaatcactcacaaaacattagacaaagtaatatatttttctattttttaacaattaaatattaccgatagttgagcagatattaatagaatttatctataaaaccagcaaaaaacgatcgtttaaaacgatttctctattttttttaccacatttataatttttgtaaatttgacttaagtgaatatatggcaatttattctttttcacgaagattgctatcactcgcttttgttttaataaataaaatagtcttatttggcattttccaaaaataatttaatccttgttttttattattaataataaaaacagaattaaatattagcttattttattaagctaagtattaaatatatattgaaaatataggaacatttaatgaaaaagttattattatctgcaattattacttcagcaatggccataattgctacacctgccctagcagaagatactggtacaccagcaccaacagaagttacagttaatggtggtactattaactttgaaggttctgtcgttaatgctgcttgtggtgttgatagtagttcaagtaaccaaactgttcgtttgggtcaattccgtgtcgctgaattcactaaaaaaggtgatgaaacaggacgtattccttttagcattaaattaaataactgcgatattactgtttcatcattagcagcaattacctttaacggtacagcttctgatggtgatgcaactgcattcgcattacaaggcagtggcgcagcaaccaatgtagcgttaaaaattaccgattcaagcagcaaaaatgttgttccaggacaaccttcttcaactcaaaaattaatcgaaggtgaaaaccaattaaattataacgcttctcttatttccactgatgatacagtgaaggcaggtagcgcaaacgttacaactaactttatggtgacttactcttaatcacttcatcacttttgattgatgtcttatcgccaaggacggcctatttttatcaaaagtattattactccatattcattagctaataaatatttattatgaaaaagatatttgcttttattatttttttattcccacttattgcttattctaatggtgtttcattaggtgctacgcgtattatttataattctaatattaaacaaactaatcttgttgtgactaattcagataaagagaatagttttctaattcaatcatgggtatctgataatcaaggtaataaaaataatgattttattgttacccctcctttatatattcttgacgctaataaagagaatgctttaagaattatgtatacaggtgaacctttacctgcagatcgcgaaagtttattttggatgaatgtcaaagctattccttctttagatgaaaagcttgctaatgaaaatacactacaaattgccatccagagtcggataaagcttttctaccgtcctagtggattgtccgcttatactgaaaaatatgccaatgaagtgactttttcctataaaaatggggagttaattgcccataatccaacaccttatcatattactatggtcaatttagctgcagccgacagtcaacttccttcaagtattatgattaacccattttcacaattaacattaggaaaagttaatcagaatgctaataccatttcattccaaaccattaatgattatggcgcacagactcctgttttaaaaaaagaaatcgttcattaatcacagcatctttttcaaccctgttggtcaaaaaccatggttaataagaatactaataaagatatcgtttattttctctttccaagtgtcattgcattgtcattgacgctgtccttttcatcatatagcgcaaaccgatttaatcctgcatttttggctgactctcctgatgccgtcaccgatttaagttattttgaagcaggcaaccgcattaaacccggtgattatcttcttgatattgtttttaatcatgagtatctgcgtagtgaaaatattcattttattagtcaagataaccatgttattccttgtttaaatcgagattattatcaatcactcgggatcaatattaaactatttgctgattttgagaaattctcggcaaatgaatgtattgatattgaaaaaatcattccagattctgttgttaattatgatattgagaaacaagctttaaatattcaagtccctcaagccgcgttagatttgaaagcacgcggttatattccaccagaaaaatgggataacggtataacagcaggtattttaaactacacctttagtggcgctaatagctggggaaattctcataataatagctactacttaaatctacgtagtgggatcaatattggtgcttggcgattacgcgattattccacttggaattcgtcaaacgggaaaaaccaatggaaccatatcaatacctatctgcaacgcaatattgtgtcattaagaagccaattacaaattggtgatagttatacctcatcaacactttttgacagtgttaattttcgaggtatttcattagaaagtgacgacactatgctacctgatagccaaagaggatttgcacctgtagtcagaggtattgctaaaggcaatgctaaagtggtgatccgccaaaacggttatgtgatttatcaaacctttgtttctccgggtgcttttgaaatccgtgatctctatccaacgtcaaatagtggcgacctctatgtcaccattgaagaaaatgatggtagcaaacacagctatgttgtgccttattctgctgtacctattttacagcgagaaggccaaaaacagtttgtcatccaagccggtgaaatacgccaaaataaccaacataaaaaacctcgctttatacaaggtcatcttatttatggcttaccctatgacaccactgtctatggtggtgcattagcaacaaaagattaccaatcttatgccctaggagcaggtaaaaatatgggtaccctaggtgccttctctaccgatatcacctttgctcatagccaattgccaaataactcaacatcagatggttattctttacgttttctttatgccaagtcgttaaaccaatttggcacaaactttcaattgctcggttatcgttactctacttcgggtttttacacattagatgagacattaaatacgcgtatgtccggttatctgtatgaagataatcaaaaaaaaccgttgagttattttaatttgcataatcgcaagaaagggagcctacaaattaatttatcacaacaactgggggattatggctctatttttatgatgaccaactggcaaaattattggggaactaatgagaaaaatgtcctagtacaaaccggctacaatggcaatattaaagggctctcttataacgtcatttatagttataacagaatgatgaatagtggtcagcgtgaccaaacattgtctgtgggtctttctatcccattacaattgctaatgccgacaagttatcaatccatcaatagcacttatctcacatataattacagccacaataataacggttactcgacacataatgcggggattgctggtacattattggaagacaatacccttaattacagtgttcaacaaggttatagcaatcaaggcggaaactataccggtagtgcggcgttgggttatcaaagtcgctatggcaatttaaatgctagctataactatcatcaagatgctcaacaaattaactatagcctcgctggaggtatgctactccatagtggcggattaaccttaagccaacccttaagcgctaatgccattttagtagatgctcgtaatactgcggatgtaccgattgataatgcgacaggggtttatactgactggcgagggtttgccgttattccctatgctaccgcttatcgacaaaatcgagtggcattagacaccaccgcattacccgataatgttgaaattgagcaaaacattaagcaggtgatcccaacacaaggcgccgtcattaaagttcagtttgatgctaaaaaagggtatcgcttattactgacgctacaacaccaaggtcgcccactcccttttggggcaatagcaactgataaacaaaatcatctgtccggtattgttggcgatgatggcttactctacttatcgggtgtccctgattcaggaaaattagagatccgctgggggcataatgcctctcaatactgtcaagtgaactatcaattacccgcctctcaacttgatgaaccttttgtgaaaatgacacaggagtgccaataatgcacaaattaatgcttattgtagcgttgtcattactgtttaccactaagggatctgcttacgatacattggtacacattaatgccagagtaacaggaaacacatgtacggtagagacaaactcaaaacgtattaccgtaaaattaggccaaatcgccacaaaagattttatttctacgacgataacgcaacaacgtacgcctgttatcccttttagtattaaattagtcgattgccaacctgaagccagtgctgtgaaggtcagttttaatggtcgtgccgatcctattgataacgccttactcgccattgatgcaacgggtgccaagggagttgccatttccattatggataacttaggagcttccatcgatattaacgataaaagccagtcttataccttattgcctaaccaagataataccctgcaattttatgctcgctatgtagcgactcaacttcctgttcaagccggatcggcgaatgcaacagcaacctttttactggagtaccaataatgacacgctctttttctttcttcacattgctggtttctcttctttgtatcccgagccaaatggcatgggctattgcagatccattagtggtaacccctccacctatgaattttgatggtgccgccgatggtactcccgcaggaacgcccatcacatcaacttggataggtgaaacctctgtccataatggtttcaaatgtgagaagaaatttttgcaaaaatgttgggttgaaaccctctatgctaatgctactggttcaaaaattagcgggatctactattacgaaggtagtaatcgttatcctgtttattcactccccggagttaaaggtatcggctatgcttttggtttaaaagataacaatgatagtgttgcttacgtacctattgatgttgataacggttcgggtgcaacggtgatttatcctgcagtaggctctaccgttaaccataatgtggatcgcgtttcactgaaaggcaaagtcgtctttgtggtgacagataaacatcttgagactggcgtttataacattccatatacagttatcgccaatacatggtctgaatatggtggaggccataaaggcaataatacctctatcgtagcaattaaccccgtcactattactattaaagctcgaggctgtaccgtaaataccaaaaatctcacctatgaattaggtgatatctcaatgcgagatatggcagccattggttcaacatcaaaaagtcaggctaaacccatctctgttacatgcgatagtaatgtgcatttatatgccagcatgaccgatcagtctacctattctaataatacagatatcctcacactgacatcagattctgatgcttctggtattggtattcaatttttctttaatgataatccaactcccgtggtgtatggccctgatatcagtgcgataggacaacctaaccaacgtttactccatataacaacttctaacaacgaaaactacatattaaacctgtcaactcgctatatcacgactgggacactaaaaccgggtaaagcaaacggattagccagtctcactttttcttatcaataatgatttgaatttttaaggctgatgaaatgattgatagcagcaaaacgattaattttcgtataggacaacgaatacgtcacttgcgaaaaaatttaaaatattcggggaaactatttgccaaagagttaggcataagtcagcaacaactttcacggtatgaacgaggaacaaataggatcagtattgagtttgtttatttaattactgaaaagtttgatgttcatatcagctatttcttacaaagtaactatatgattaatattgagcaacaacgaaatatacaagaaaaaaacagcctgctgattgccgaggcttgtataaaaaatggcactaatcgcccttaacttaattatcctttcggttcaaatacacactgtcatctattttatcgttgatttaatgataatgttctcttttttctatacaaatataagaagccaccgtttaacggtggctttttggtactgataaacttaattaacgacccgctttcagtttttggtaatagctttcgtataaaaccgtcgcttcacccacatcattttgccattcgcctttactgataatctcttcactagggtaaagtgagctatcttttgtgatagcttttggcaataatttttgtgccgctaaattaggtgttggatagccgatattttcagccacttttgcagcaacttcagggcgtaataagaagtcgataagcttatgcgcaccttcaacattttttgcatttgcaggaatagctaagctgtccatccagaagataccgccctcttttggccataccaactcaataggagcaccggcttctcgcgcaataaatgcagagccattccagatcatccctagattcacttctccttgcatataaggattggcaggattatccgaattaaaagccagtacattaggcatcagcttttgtaactctttataggcttcttcaatctgttttggatctgtggtattacctgaatagcctaattttaataaagccatttggaatacttcacgtgcatcatccgttaacagtaaactatctttatattccggtttccataaatcagcccatgaagtaatgctacttacatcaacttcatcactattaatccctatcgcagtcgctccccaaatataagggattgagtagtcattttgaggatcgaatgatttatgtaataaacttgggtcaagattatcaaaattactgagcttcgatttatcaatcttctgtagcatcccctcatgactcattttagaaataaaataagttgaaggaaccaccaaatcataagcaccatctttataggtttttaatttggtatacatgctttcgttagattcataggtggagtaaatcaccttaatcccagtttcttttgtaaactgttccagcaatcctggcggtacatattccgtccagttatagaaatagattgtcttaccatcatcagccgatgctgtaccaatacttaatgccattacactggcagcaagtacagaggaccactttttcatttaggcttccttcagtggttgatgcgttaatatcaaataggcgtaacgcctacctccaacagatttggtcatcaagaccgtaaaaagtgcgagaaactcgcactaatacttttaaattacgctttgccagttctatctcgtaagatcaactgactaattaatactaatactaatgatagccctaaaaggatggttgccagtgcattcacttccggtgaaacacctacttttaccattgagtaaatttttaatggtaaaatttcatagcttggtccagtcacaaaagaggagacaaccacgtcatccatcgataacgtaaagcttaataaccaccccgaggctactgctggcatcgctaatggcataatgattttacgtaaaatagtaaattcacccgcccctagatccttagcggcttcaagcattttgacatcaaaaccactgagtcgcgaatagaccgtgaccaccacaaaaggcagacaaaaggtaatatgcgacaccagtaatgaccaaaaccctaaggaaatgcctaatagcataaataaaaccaataatgaaatcgccatcacaatatctggcgacatcatcaccacaaacagcataccaccaacaaactttttaccacgaaaacgatagcgataaagcgccaccgcagccaatgaaccaatcaacgtcgcaaaggttgctgaggtgactgccatcgttaatgaatgccctgcagcttgtagcaggctgtcattatttaataaaatggtataccagtcagtggtaaagcctttccagttgatcccgaaacgtgatgagttaaaagagttaactatcagaatgataatcgggatataaagatacgcgtaaatgatggacataaatccaccccgcaataaccgtcctatcattctatttctaccttcttatgcagtagttttacggctcggtaatacacaaatagcattaaccccatcaccagtgttaaacagatactggtagctgccccaaatggccagtcgcgaatatttaagaattggctctttattacgttaccaataagtaggtttttcgcgccccccattaagtccgccacaaagaataagcccatggcaggtaacattaccaataaacaacctgcgatgatccccggcatagttaatgggataataatacgaataaaggtctgtaatttattcgcaccgagatctcgagctgcttccaaacagggtttatccagtttttcaatgctggaatagagtggcagaaccataaaaggtaataaaatataaaccaaccctaatactaccgcctctggggtatagataatccttagcggtttatcgataagccctatccacaatagaaactcattaaaatagcctttcgtactaagaaaaatctttaacccataaatacgaataagtgagttagtccaaaagggaactattaataaaaacagcagtaatggttgtattttcttaggcatttttgccagaaaaaaagcaaaaggataacctaatattaaacaagctaaggtcgctaccaatgccatattaatagagtgcagtaatacttctgcatacattggatcaaataagcgataatagttatcgagtgtaaaaaccatctcgactaaattcgcatcatcacgggttaaaaaactggtggcgatgatcatgatattcggtaagaagacgaacaccattaaccaacccacaacaccagtaataacgatgttttgaaatagtttacgtgttttcttcatcagccagcacgacctcccagctctcaacccaagttaccgctatcttttggtctaacgagtgatcaacatccggatcatcttcattaaagaattcactcaccatcaccatcttgccattttccatttcaacaacagaatctagcgtcatgcctttatagttacgttcacgaacataaccgataagtcccggaaggttttcaagatcgtgtatctcttcaacgcgcagatcttctggtctgagtaacactttcagttgctgattttgagtaacaggtaattgcgtataaatatcgcattcgtgcccttcaacatccgctctaatacgtgtctcatcaatacgatgtaggacacgtgcatcaaagatattgatttcacctataaattgagcaacgaataaattagttggctcttcatagatttctcgaggcgtgccgtcttgctcaatacgcccttctttcattaccacgatcctatctgacatagtcagtgcttcttcctgatcgtgggtgacgaaaataaaggtgatccccagttttcgttgtaaggcttttagctcattttgcatctgcttacgtaatttgtaatccagagcagacaatgattcgtctaacaacaataccttcggcttattgaccaccgcccgtgcaatcgcaacccgttgctgttgaccaccagaaaggtgagcaggacggcgttgggcaaagtcctccagttgcaccatacgtaacgcttccataacgcgactattgatctctgcagcaggtgttttctgcatacgtagaccaaaagccacattttcaaatacggtcatatggggaaacagggcataactttggaaaacggtatttacaaaacgctgttctgctggaatatgggtaatatcctgtccatctaggataatttgtccatcatccgcgtcttctaagcccgcaattaaacgtaataccgtcgtcttaccacagcctgaagggccgagtatggttaaaaactcgccatggttgatagtcagatcgaggcgggaaatgatttgttttccgtcgaaacctttacttaaggattttaattcgactagtggtgtcagagatgttttctcagtcatttaaggtaatactctatcccgaagaataatgcagatagaaccgccgccggaaaagactgtgtgagctgccggagcagtatgctccacagaagcccaaaaccagcaacgccgtatgtatagtacaaggggcaaatgataaacgtagtgaggtaaaattgaaagcaaaaaggtacatttcttatgaaaaactattcatttttaagcttttcatcataactttcgactttgttataaaaaacaaaaaatagaatataatcaaataattaataataagtataaatactaataaattattttaatttatgattaaataaattttttatcacaaatcattctatcgcggtattttcaagtctaaaacagacttaaaaaagattattttcagcaagataaatactaaaaataccttccatagtcttaagccatagaaggtatcctttctattaattatattggattaaattttttaaatgtaagatggcattatttacattaggcaaagggcctatcttttcatttaatgatggataagttcctgttttaatcagtagctctcgcatctctattggcgttaataccgtgttggttttatctttataccaagattgaataaccgcagccgcccccgcgactaatgcacaggctgatgatgttccactaaaattagccgtatatttgttattcccgtcaccatgaaaaagatcaccatatccggcagtggtcacatcttctccccatgcttgcacatgtatgggggagccatgcgttgagaaaggtaaacgatttagcgtataaggcgagcccgcaccgacacgtatagagtggttatcgctacgttgacgatagctatcataaaaaggtaaatcgagatcaacccccccattgccggcagccatgatcacaataatccccgcttctgttaatgtacgagttgcctcccagatatgcatttcataatcagcaggaacataagcatgatgttcacaaactgtctgcatctcatataaaacaatatcacccgcgtgtaatttctgtttactggcaataattgcttcaatacgaccactgcttaattctgatatggcataaaacatatctaatttataagcaagcccagtaatacctttaccgtcttttttccccataattaaccccgccactgccgtaccatggtcggcttgatcggttttttcagttaaaggaaaaagtggcgtgatattattagctaacaaatcgggatgtgataaatcaaaatcccactcaatatcggccacctgtataccttgtccataagcatttttattccaagcgtctataatacctaacccagttatttcatttgattttatttttggggtttttaaataatgctgatggcgagttaaatccggcgtaatattaggtggctgtacaggtaattttggaattttttgcacatattctatatcaggatgttgttttaatattttaataatttcatctaatgtatatgtgttatcattaggtaaatttaaataatagtaatcatttaaatgatttgatgtaagagaaagatgatttttaggtggtaattgtgatgatgataatactggaacaaaagaaatattagataaaaatgtattatattgattatggtaaccagagcgtaatagttttttattttgatcaagtgaatgtatattttttagtttgactagtattttcctttcaatattcataaccaatgctccttttctattttttatttttacttttgttttataacgtagatttttgagcattggctattttcatttttaatagcattgagataaatttaattattaagataatatactgtgtatttatactcattaaataatttagtttttcttagacaggatgcacttccatttgaatgggatcaaagatccagaccagtgagtgcacaatataaatctttttcattgttttacttgagtcgcattgggatggttgccttgagctgaggctggttttggaatgaaagtaacatcaataccaaccgttaaaggccaagctttgcgtctcttctgcattgattggttggtgtaaaatatctgatgtgactttttacagcgtaaaatcgcataagagtggttgtttgtaagtaaagagtcgagagttagatagcgtcttaattattgattttacaggcatattgatattccactctgatgataaaaaagtatatctatacatccgatgaagaacaagctacttgacatcaatcgggaattgactagaatctaatcatcgacggaaacgtcactagattgaaagcgcggtacagtgtgaagctggttggtcttagaccccgttagcgagatattttcgaagggctccttataggagcccttttcgatctaataattaaacctagattagttcatcaataattaagcttcgtacataaaatctaattatatcggcctcgttttagggaaagatcacaccacctgctctatcacattttgttatgctatagtaagccatctcgatataaatcctctcttactctcagtaaaacaccaaaatctggtgtcctcattggtgtcctgataaagagaaaacacactaaaatgggttataatgcacgaaaatacaccaaccgataaaacactagaaaacaagcaaacacagggcactcaagggaattacccacttaatcgcttctctgttgcacctatgctcgattggactgatcgccattgccgttatttctttcgccagcttaccaaaaatactttgctgtatactgaaatggtcacaacaggtgccattattcatggcaaaggtgattatttaaaatatagcaacgaagagcacccgatctcattacagcttggcggcagtgatccacaagcgttagcgcaatgtgcaaaattggcacaagagcgtggatatgatgaaattaatttaaatgtaggttgcccttctgatcgggtacaaaatggacgctttggtgcttgtttaatgggtgaagcacaactcgttgcagattgcgtgaaagctatgcgtgatgtggtcgatattcctgtgacggtaaaaacacgtattggcatcgacaaccaagatagttatcaatttctatgtgattttattgataccgtcagccgtgataataactgcgatacctttattattcatgctcgcaaagcttggttatcgggattaagccccaaagaaaaccgcgaagtgcctcctttagattatcctcgtgtttatcaattaaaacgtgatttctcgcatctcactatggcaattaatgggggaattaagtcactagaagaggcgcaggagcacttaaaatatatggatggtgttatggtaggtcgcgaagcttatcaaaatccatcaatattggctcatgtggatcacgtgctttttgataatcagttacctgttgctaatgccgtcgctgccgtaaaagccatgtatccttatattgaaaaagagctctcacaaggcacttatttaggtcatatcacccgccatatgttgggaattttccaaggtattcccggggcaagacaatggcgtcgtcatttaagtgaaaatgcccacaaacaaggtgctgatttaaccgtgctagagaatgcgctcaagtttgtgaccgaaaaatagtcctttttaacctgtgataaaaatccatcttactcaaattgcttaatcaactatttagttaatcagttaataaagatggattttttatacttgtaacctttaaaaactatgggatcaatagacttgaaccttgagattgacgactttcaagataacggtgtgcggctttagcatcagctaatgcaaatttctgattatctggcacactgacatcaattttaccacgaccaattaacgtaaatagtgcttcacttgctgcatctaactcttcgcgcgtcgtaatgtagccggaaatagaaggacgagtaacataaagtgaacccaatttattaagaatacctaaatcaacccctgttaccgcaccagaagcgttaccaaaactgaccattaagcctcggcgttgcaaacagtgcaacgaatccaaccaagttgctttgccaacagaatcatacacaacgggtactttttggttattggtgagcgcaaggacacgttcaacaatagattcagtttgatagttaatcactttccatgcacctgcggccttagctttagccactttctcatcactgcctgcagtaccaatcattttagcgccaatcgctttcgcccattggctggcaattagcccgacgccacccgccgctgcatggaataaaaaggtttcccctgcacgtaatttgtatgtttcattgaatagataataaaccgttaatcctttcaaaaaagaggcggcggcttgttcaaaagagatattatcaggcaggcgagctactttattttctggtacattatgcgtatcgctgtaggcgcctaatggagattgtgcatatacaactctatccccttctttaagtgaagtaacatgagcgcctgttttaatcacaacaccggcagcttcagttcctaagccacttgggaaatgctctactggatataatccgctacgcacataagtatcaatataattaatgccaatggctttattggcaacctgtacttcgttatcgcctagaggggcgggggtaaatgaagttagctcgagtacatcggcattaccatgagctgcaaactgaatgcgtttagccatcgtaatctcctttataagattgatgattgacctaggattatataaaccagcgttgtaacgacctgtagagataatgacaaatgatcgttatttctacaaggcacagattattgggttagcgtatactaatgcgctgattgatattttttcgactttgtgcaggatttatggccagaaacaagaccactgacaagctaatgtctgagataaaagatcgccaaatggaagggttgaagcttcccccccattcgctagaagccgaacaatcggtgttaggcggtctaatgatagataacgagcgttgggataatgtctccgagcgtgtcactgccgatgatttttatagccgacctcatcgcactatttttgcgcaaatgcagcgtttacttgagctgggtaaacctattgatctgataaccttatcagaagcactagaacaaaacgcagaattagaaagcgttggaggctttgcttatttagcagaactatccaaaaatacgccaagtgcagccaatattaacgcttatgccgacattgtacgtgagcgtgctgtcgttcgcgatatgatcaaagtcgccaatgaaattgctgatgctggatttgatccccaaggacgcaccagcgaagatctgctcgattttgctgaatctcgcgtctttcaaattgccgaaacccgcgccaataaagatgaagggccaaaagcaattgatgccattttagaagaaaccgttgaaaaaatagagcaactctaccaaaaacctcatgatggtgtgacgggggtatccagtggctatcaagatctggataaaaaaaccgccggactgcaaaaatcagatttaattattgtcgcagcacgtccttctatgggtaaaaccaccttcgcgatgaacttatgcgaaaatgcggcaatgacggaagaaaaacctgtacttatctttagcttagagatgccaggtaaccaaatcatgatgcgtatgctcgcttcattgtctcgcgtggatcaaacccgtattcgtactgggcaacttgacgatgaagattgggcgcgtatttcaagtaccatgggtattttgcttgaaaaacgtaatatgtatattgatgattcctctggtttaacccccaccgaggtgcgctctcgtgcccgaagaatttatcgtgaacatggcggtttaagcctaatcatgattgactacttgcagttaatgagagtaccttcattatctgagaaccgaactttagaaattgctgaaatttcacgctctttgaaagcattagctaaagaattacaggttcctgttgtcgctctgtcacagttaaaccgtagtttggaacaacgtgctgataagcgcccagttaactctgacttacgtgaatcgggctctattgagcaagatgccgacttgattatgtttatctatcgtgacgaagtttatcacgaaaatagcgacctaaaaggggtggcagaaattatcattggtaaacagcgtaatggccctatcggtacggtaagactaacctttaatggtcaatggtctcgctttgataactacgcaggccctgcttacgacgacgaataaccatccaccttgacggaataaaaggaaatagagaaataacatgaaagcggcaaccgcagtaatagatcgccgcgctctgcgtcacaattttcagcatgtaagagactatgcaccacatagccacctgatagctgtcgtgaaagcaaacgcttatggtcatgggttattagaaacagcatatactttaatggatgatgctgattgttttggcgtagcacgtatcggtgaagccttaacattacgtagtggggggattgtgaaacccatcctactacttgaaggcttctttgatgctgttgatttacccattttggtggttaaccatattgagactgttgttcatagtgaagagcaactcgaagcgttagaaaatgccgatttagaagaacccgtaaaagtctggatgaagctcgatactggaatgcatcgtttaggcgtccgtcctgaagaagctgaggctttttatcaacgactttgtgcttgtaaaaatgtccaacaacccgtcaatttggtcagtcactttagtcgcgcggatgagcctgatattcctgaagtcacacaaaatcaaattcagctatttcaagcctttatccaagataaagcgggtgataaatctatcgctgcttctgcgggaattttattttggccacaagtccattatcaatgggttcgccctgggatcatcacatacggtatctcaccaacgggtgataacagaacaggtaaagactttggtttaaccccggcaatgacattaaaaacgagccttattgcggttcgtaaacataaagcaggtgaacccgttggttatggtggtacatgggtaagtgaaaaagatacttatctgggtgttattgctatcggttatggtgatggttacccacgtagtgcaccttctggtactcctgtttggatcaacggtcgaaaagtgccgattgttggacgcgtttctatggatatgatcagcgtcgatttgggatctgagctaattgatcgtgtcggtgatgaagctattttatggggagatgtgctacccgtagaagaaattgccaaatatagtggtattagcgcgtacgaattaattaccaaattaacttcgcgcgtcattatggaatacctagacgaacaatagcacacaagatattgtatctatctggcacacaaaaagtgattggagaataaaagccgtgtttcaacaggttgaagcgtttgcgggagatccgattctctcattaatggatgtctataataaagatccacgtcaagataaaattaacctaagtattggtctttattatgatgaagaaggcaaaacccccattctaggcactgtgtctgtggcacgtcagcagcttaatgcgatgacacctaccgcaacactgtatttgccaatggaaggactcgccccttatcgccacgaagtacagactctcctttttggtgctgataacccgcttattgcagacaaaaagattgctaccatacaaacattaggtggctccggagcgctaaaagtcggcgcagattttctacatcgctattttccaagctctgaagtttggatcagtgatcccacttgggacaatcatgcgtctatttttgcgggctccggttttaaagtaaattattatccttattttgatcccgaaaccaaaggggtcaaattcgatgcattaatagattgctttaaaaaacttcctgaaaaaagcatcgtactgatgcacccatgttgccataatccaacaggatccgatctcaccaaagcacaatgggatcaggtcattgagatcctcaaagcgcgtcaagcaatccctttccttgatattgcttatcagggatttgctgaaagtttagatgatgatgcttatgcggttcgcgctatggcaaaagcggggttacctgtattagtcagtaactcattctctaaaatcttcgggatttatggggaacgggcgggtggcttatcgattgtatgtgataacgcgaaagagtgtgagcatgtattagggcaattaaaagcgggcgcacgtcgtatctattcaagtcctgctaactatggcgcacaactggttaatcaagttttatcagatcatgtattaaccgcacaatggcaaaaagaagtggctcatatgcgtgaccgcatcaaagagatgcgtgtaactttagttaatgccttaaaagaagcattacctgagaaaaactttgatcatttattaacacaacgcggtatgttcagttataccggcttttcaccagagcaagtagatagattacgtgaagagtttggtatttacctgattggtacaggtcgtgtttgtatggcgggtgtcaataacaataatgtgcagcgcattgcacaagcctttgcagctgtcagttaattaatataaccaaccattcgttgctgatattagcttaaaaaaatacctgcctattttcataagcaggtattttctttactgcattacaacatttttcactgtctttttaggtctttgccttttatgcattgacagcttgctgcttttccccggcattacggcgtgctttttcttccatgatctcaataatttgaatatctgtatgttgcattgcacgactagctaatgcgcagagattcgcaattgaactatcaacatcatcactgacaatcccgtcagtgcccgctacactttgattttgcatcgccattaaaacggctttatacgcactcgccgcactacttgatactttcatcgcacagctatttgaggcgccatcacagataatgccactaatatcaccaatcatactgttgattgacatacttacagtggtgaagtctttagtcagtagccatgccatacccgcagccgcccccattgatgcagtggttgccgcacacaatgcagacagaggtgggaaatggctatgaacataaatcgccattaagtgcgataaaactaatgcccgtaataaagtttcgtcatctgcttgaataaattcagcaactaccattaccggcaatgttgcagcaatgccttgattaccggagcctgagttactcatagcaggtaatacagcgccccccatacgtgcatctgaagcggcagacgttcttatcatgatttcactcagtaaatccttacctaataagccattctcttgctgtgaaaccagcgtccgccctatcgccaatccataactattttttagcccttcttctgataaagcaccatttagataagccgcatcaagcataaaggcgacttgatctataggtacattgagtgcaaagcgataaatatcttcagcacaaaccgtcgcaaaaggcttttcttctacgctatccccggcatgagtcaaactcgttttatcatcctcaaaaacaactttgccattacactcacagcgcacaacatgggtatgctctttagcaatactgacaatggcataacctgactgaccatatacttttgcttcggagtagagtacatcactacatggcgttttcacgccaaccgtcacttttccttcagcaaccaatgtcttagcctgagcgatagcttgtggtgatactgtaagtaatacttcaaggccagcatccggattgccccctgtcgcccctaatgcagccgcgatgggcaatcccgccattcccgttcctggtactgttacgcccattccgtttttcattaaattaggcgaaacccacgcttcaataccaacaacaggctcagctaataacgcggttgcttttgccgcagctaatgccaatgaaatcggctcagtgcaacctactgctggcttaacaccttcacgtaattgacgaataaactgcgaccataaatgagaattattgttctggctcataatctaacaccttggattaatatcgtttttaataacagctaactcgaaccgcagttgacgactatgagaatgccaagaacggagaaacacaaagtagcagacccgtaaagataatcagataaagtgatgcgcctttgtatttatgtaacatcggtactttgtacactaggtatgcagggataagacaaccgaccataccaaagataggactacaaattgaggtaaagctcagtactggtgcattgagaataatggcgccccaagctaacagcacagcaaagatcataatgccgttttgtacccatttttcattgattttttcaacgggcatcatgcgctgcagaatattcatcacaatcccttgtgtggcttcacggaaaccgagatagacaccaaagaatgcggtcattactgcgaaaatattcaacattacactcactacggttacccaaccgccagggaagaattttgccgcaatcgctaatgcagagatattttgctcataagcttttactgcttcatcatgtcccattgctaatgtgaaggagattgcatagaaaaacaccgtacagaacaacacaccgaaagcgatattcattgcacgtaatgctttatgacgcgctacttcacgattttggttacgactacgataagagataaccattgggcttaatgtttggataaacaaaatagaagttaatgtaaaaggtagtgtgataatggcttctttaattaaacgtccggcagggggtaatgcgccaacattatacagatgccacataccaatcattgaaagacctaatgccgcaacaaccagtagttttgtcattaccataaagcttgatagcttaaacagtaattgttcaccacgagaagaaatagccactaacgcacagattaaaatcagaccatagaatggattttctgataataaactgtcagtcacaccaaaagtttgtagataagaagcactgtcattcgtgatagctgtggaatagacaaacatccaaatcactaacatcacaaaatagagtgcacctaataaaataccccagtttttaccgagataaccggtgataacgcttgggtagtctttacactcaggagattcagccaacgtattaataaataggcgttggaaaaggtacattgcggggtaaccaatcacggaggaaagtaagaaaacccacaatcccattaagccaacctgtacaggtaaaaaaacaatccctgcaccgatagccataccgatactcatgataacccagcccacatcattgccgtcaaatttaattgctgcacgccattgttcttctgtcatacctgctcggcgagcgccagcactagttgcgggatagcttgttgtctctgtttttgaggaagccgtttccatattagtactcactttttatattgtaattgttaatagcaaaacgaattttgggggtaaaaagaactatctaactttgcgatgacctaatagccttactttttgcaggtatttttattatgggtaaatgataggaaatattgcggagaaaaaagttgttataaatcgtgatagctgaaaacgttttgggaaataattctctcacaaggagaaaagtaggattatctgttcaaagggaacagtaaataataaccttccccctacggcaaccttttgatttacataacactttgaaatataacaaaatatcactattgttatacaataatagtcaagtataacaaatgaaacaaatccatgaataaactgtgctatgcatcacgatatactatgataatcctttctatttagctttgttatctcgtatttagttaaaataatgtaataaaacagcagaattaactatttattcttttttttataaaaagagtgttaattatataaaaagcggctatcagcgtgactgacgaaaaaagaatagttttatctaatagaattaatttctctaataaaatatcaaattcctttttataaagaaaaacgctacaaacaaaatttgtagcgtttagacaagaagtgcgtaaaccgagtgctattaataaccgcgctctaaaattggtttcaaaaaccttgccgtgtgggagccttcaaagtcagcaacttgctctggcgtaccggatatcaagatctgaccacccccactgcccccttcaggccctaaatcaacgatccagtcagcggttttgatcacatcgagattatgctcaatcaccacaatcgtattaccctgatcacgcaactgatggagcacatcaagaagtaactcaatatcggcaaagtgtaaacccgtggtcggttcatccaaaatatagagggtttggcctgtaccccgttttgacaactctttggctaatttaacccgttgtgcttcaccacccgataacgtagtggcagattgtcctaaacgaatataagagagtcccacatcaatcaatgtttgtagcttacgcgctaatgcaggcaccgcatcaaaaaactctcttgcttcttcgattgtcatatctagcgcttcgtgaatatttttccctttatatttaatctcaagggtttcacgattataacgttgccctttacactgatcacaaggcacatacacatcaggtaaaaagtgcatttcaacttttaatacaccatcgccttggcaagcttcgcaacgcccccccttcacattaaaactaaagcgccccggcgtataaccgcgagttcgtgattctggtacaccagcaaaaagttcacggatcggggtaaatactccggtataagtcgcagggttggaacgtggcgtacgaccgataggactttggttaatatcaatcactttatcaaaatgctctaatccctcaacgtctaaataaggtgctggcacgctattagtggcgccatttaattgacgttgggcaatggggaataacgtatcattaattaaggttgatttacccgagccagatacaccggtaatacaagtaaataaaccaacaggtatttttaaattaacgttttttaggttattacctttcgcccctaaaatagtgagcattttttcgcgatcaacaggaacacgcttttcagggatagcaatacggcgttcgccacttaagaatttaccggttaatgagttgggattattaacaatatcttccagtgtaccctgagcgactatctcaccaccatgaacgccagcacccggcccaatatcaataatatgatcagcggcacggatagcgtcttcatcatgctcaacgacgatcaccgtgttacctaaatcacgcaagtggatcaaggtttccagtaggcgatcgttatcgcgttgatgcaaaccaattgaaggctcatcaagtacatacattaccccaactaatccagcaccaatttggcttgctaggcgaatacgctgcgcttcgccgcctgataatgtctccgctgaacgagaaagagtgaggtaatttaatcccacattgaccaagaattttaatctgtcaccaatctcttttaatactttttcggcaatcttcgctcgctgaccactgagttttagattttggaaaaagctcatcgcatgaccaatactgtaatccgcaatttcaggtaacgtggtattttcaacatacacatggcgagcttcgcgacgtaagcgagtacctccacaagaggcacaaggacgattgctaatatatttagctaactcttcacgcaccgcactcgattctgtttcacgatagcggcgctccatattatttaataccccttcaaaaggatgatggcggaccacaacatcccctcgatcattggtgtatttaaattcaatattttctttacctgaaccggataaaatcactttctggatcttgtcgggtaatgagtcaaagggggcttcaacatcaaaatgatagtgctcgcctaatgagcgcaacatttggaaatagtaaaaattgcgccgatcccaccctttaatcgcaccaccggccagagaaatttctcgattctggatcaccaaatcaggatcgaaaaattgttgaacacctaaaccatcacaagtaggacacgcacctgcggggttattaaaagagaataaccgtggctctagttcactcatgctataaccacaaataggacaggcaaagtttgcagaaaaaacaatatcttcagcactgctatcgtccatatcagagataacagcagtaccgccagaaagctctaatgcggtttcaaaagattccgctaaacgttgagccagatcgtcacgaactttaaagcgatcaatgaccacttcaatggtgtgctttttctgtaactccaaggtagggggatctgataaatcacacacttcaccatcgatacgagcacgaatatagccttgtgcagcaagattattgagtaattttacatgctcacctttgcgctcttttacgattggcgccaataacattaagcgtttaccttcaggttgcgctaaaacattatccaccatttggcttaccgtttgagccgctaaagggatatcatgatcaggacagcgcggttcacccacacgtgcaaataatagacgtaggtaatcgtggatctcggtaatggtgccgaccgttgagcgcgggttatgtgatgtcgatttctgctcaatcgaaatagcgggcgataacccttcaatatgatcaacatcaggcttttccattaaggaaaggaactgacgagcataagctgaaagcgattcaacgtaacgccgttggccttccgcataaagcgtatcaaaggctaaagaggatttacctgagccagaaagtcccgtaataacaataagtttatcgcgaggaatgaccaaattgatattttttaggttatgggtgcgagcgccccgtacttcgattttatccatgaatatatcccggattaagtgagtcgccgaaaaagaaagaatcggataattatgacacaaaactagctgaatggatatacagtatatatattgaaactgaatgataatgaaaatttgccatattaagacaataaaatgtcgatcctgttctcaatggagaaattcattactcatcatattcaaattttagcttacgtgataaacttcatcgcttatgatttcaaaaaatttactttcgcaggagtacctcacatggcgagcagaggcgttaacaaagttattcttatcggtaatttagggcaggatccagaaatccgttatatgccaagtggtggtgcagtggcaaatctgacactagcaacttcagaaagctggcgcgacaaacaaaccggtgaaatgaaagagaaaaccgaatggcaccgtgtggtcattttcggcaaactagcagaaattgctggcgagtatctgcgtaaaggttcacaagtttatattgaaggtcaattacaaacacgtaaatggcaagatcaaagtggtcaagatcgctacagcactgaagttgtggtgaatatcggtggcacaatgcagatgttaggtggccgtggtggtcaagataatgcaccttcacaaggccaaggcggttggggtcaacctcagcaaccacaagcatcacaacagtttagtggtggcgcaccatctcgcccagcacaacaacccgcagcggcaccagcgccaagtaatgaaccaccaatggactttgatgacgatattccgttctgacggttacttaagaactcaccttatcttctaagtcatataacatcaaacgctaaagcctgttataccattaacgggcttttctttgtttcatgcttatcccgcatttgccaatcatattgtcacaccttgtctatttcccattgtctatttcccattgactattactcgttcatcattggcgttaaggtaagtcttgtgaatgagtattagcccctttcaccatggttagatttgatttactgataatgacaatttatagcgttattttctcaaaatcccactttccacaaaggtttgctcaaaaaaaatatggtaagatcatcgcaattaatcacgtctgagagcatcctatcctatgaatgaagagaaattgctcgctcaggcagaaaagatctgccagaaacgaggtgttcgcctgacttcacaacgtctggcagtattgcgtctgatcatgcaacaacctaccgcaatcagcgcttatgatttattagatttattacgccaagtagagcctcaagctaaaccacctaccgtatatcgtggattggaatttctacttgaacaaggttttattcacaaaatagaatccaccaatagctatgtgctttgtcatcattttgatgatgctgagcatacatcggtgatgttaatttgtgatcgttgcttatcagtcacagaaaaaagtagccataaaattgaaggggcgatcaccacactcgctaaagataatggctttcatttacgccatagtgtgattgaaattcatgggctgtgcgctcagtgccatgaagcccaagcctgtacacatccggaaggttgtcaccatgatcatagtatggatgataatcttaagcagaaaaaaaccggtgactataagcctcgttaagcagataaaagataaaagtcagcggaacatatgtttttttgtataaattaaaaacagaaaatgcagatgattttatgtttttacacatcatctgcatctttttgacgttctccccgccctgatgaactggaggacgaggtttcggcgcatctggtacaataatttgtattgaatgaattagatacaaattacagccattcgccgttacggataacccctactgctaatccttccacagtaaagctctgctcacgtaaatcaacgataataggtgaaaactctggattttctgcgtgcagttctatcttactaccgactttcttaaatcgttttacagttacttcatcttcaatacgtgcgacaatcacttggccattatggacatcttgtgttttatgcacagcaagtagatcgccatccataataccgatatctttcatcgacataccattaacacgcagtaaaaaatctgcgctcggtttaaaaagcataggatcaacttgataatggctttcgatatgctcttgcgctaaaagtggttcaccggctgcaactcgtccaattaatggtaagccttcaggctcttcttcaagtagcaaacggatacctctagatgcaccagagacaatttctatcacgcctttgcgagcaagtgcttttaaatgctcttctgccgcattaggtgagcgaaaaccaagttgggaagcgatttccgcccgtgttggtggcatacccgtttgcgaaatgtgatcacgaaccaaatcgtaaacctgctgctgccttgcagttaatgctttcattccgccccctgtttgtttatacagtcagactgtgagtatatacaggtatatgccgattgggaactacaaatgcatataaaacacgcatctttgcattatttttcgacaattgtcgattttttttactttatgcaaaaaaatgatgccaaagaatggttccccaagtaaataatcccaatataatagcgacgagaacggcagctgatcccatatcctttgctcgtcctgataattcatgacgttctgtaccaatgcgatcgacgacagcttctatagcactattgaccagttctaaaataacgacaaggacgactgaaccaatcaataaaatgcgctctagaacactgacatcgataaaaaatgcaaggataattgctattaaggtcacaatagcttcttgtctaaaagcggcttcattgatccaagcggcgcgtaagccctgatatgaatagccaccagctttaatgattcgggtaagacctttattttgattagccataataaactctatcgaaaacaaacgattattttgccacttttctctattaatattgtcacagcaccacagatctacgaaagactttctgttatgctttcgaagtattgctaataagaggctacaactatttatgtcagcttggcgtaaactatattataacacattgaatttaccactgaaattgttggtaaaaagtaaacgagttccgactgatcctatcactgagttaggcttagatacgtcgcgatctttcctttatgttctgccttatcactctaaagcagacttactgacattacgtcagcaatgtttatctcttggcttgccagatcctctgcaacccatagaaattaacggaaccaaactgccagcctacgtctttattgacgatggtcctagagtattccgttactactctcccgatccgcgtaaagattcagtgaaaacattccatgcttatcttgatgctcatcgtaacaatccgcatcttgatattgaaatgttacctgcttcagtgatgttcggtcgctcaccgggtcgagaaggtcataatggtgtcccccatttgcgcttattaaatgggatccaaaaatttattgccatcctctggctaggtcgagatagttttgtccgtttctcgccgaccgtatccatgcgccaaatggcgaatgaacatggaaccgataccagcattgctcgaaaacttgcgcgtgtggcacgtattcacttttcacgtcagcgtttagcagcagttggcccaaaactacctgcacgccaagatctcttcaataaactattggcatccaaagccattgaaaaagccattgaagatgaagcaaaagcgaaaaaaattacgcttgataaagcacgtaaaaatgccactgatatcatggaagagatcgccgctaatttctcttatgaagcggtacgaatgactgatcgtgtattaagctggacatggaataagctctatcaaggtatcaacgtttttaatgcagaacgtgtgcgccaacttgcgcaagatggacatgaaattgtctacgtaccttgtcaccgtagtcatatggactacttattgctttcctatgtactttatcatcaaggattggttcccccacatattgctgcgggtattaaccttaatttctggccagcaggaccgattttccgccatttaggggctttctttattcgtcgaacctttaaaggaaataaactttattcaaccatcttccgggaatatttaggtgaattattctctcgaggctactctattgaatattttgttgaaggtggacgctcccgtacaggtcgactgttagatcctaaaacagggacgctgtcaatgaccgtgcaagccatgttacgtggtgagacacgccctatttccatcgttcccatttatattggctatgagcatgtcatggaagttgccacttatgccaaagagttgcgtggtgcgacaaaagagaaagaaggttttatgcagatgatcagaggattgcgtaaactacgtaaccttggtcaaggctatgtcaattttggtgaacctatttcgctatcacaataccttaatcaggcagtgcctgactggcgcgatgatattgatcccattgagccacaacgtccaagctggttaaatcctgcagttagtgcgttagcggataatattatggtcaatattaataatgccgcttcgattaatgcgattaaccttgtctctacggcgttgctagcgtcccgtcagcgagcattaactaaagaacaattattagagcaaatagattgttatctacagttactgcgtaatgtgccttactcatcagatatggttgtccccgataaaagctcagaaacattattagcacacgccttgcaaacagataaattccaagttgagcaggatagtcttggtgatattattatattgcctcgtgaaagtgccgtattgatgacttattatcgcaataacaccattcacttaatggttacaccatcattaattgcgagcattgtcttgcatcacgagcgtatacaccgtgatgacttaatgaaacaggtagaattaattttccctcttatcaaagctgagttgtttattcgctatgaaaaagaggagttacctgatgtggttaatacactgattagtgagctttgtcgccaacgtctaatttgctgtgctgatgatggcatattacggatcaatccagcacgtattcgcccattacagcttttagcagcaagtgttagagaaacgctacagcgttatggtattacgctctctctactcaattttgctcctgaaattagccgtgcactattagaaagagaaagccgcattttggcgcaacgactttctgtattgcatggtattaacgcacctgagttctttgataaagcggttttctccactttagtttctacactgcgtgaagaaggttatctcaaagataatgaagatatcctcaaagcagatgcctctgcactttaccaagttattgcgaaattaatgtcaccagaaattcgtttaaccattgagagtgtaggcgttactgaagataacaattcagcacaagcgattgaggaaaaccctgaatccaacatggataagtagttgcttaatagcaaatcgcgctataatcagtaatagaaaagggataagcaattggcttatcccttttatttttatgcaacttcagtgctcagctagtgctggtaatatatttattagaaataattaaataaaatacctgcgaataaaacaaaaccgacataattattattcataaacgcttgaaaacaaggggctctttcccgttcagcaattaatttctgttgataaataaacagggctgtcacgagtaacaatgaccaataatagatccctttcatattcagcaaaacgccaatcgccactaataatgccaacatcactaactgtaaaataccaataatgattttatcgtaacgaccaaacagaatggctgtcgatttcacccctatttttaaatcatcattgcgatcgaccatggcatattgagtgtcatacacaacagaccagataatattgaccaaaaagagtaaccaacatactaaaggtagtgtttcagaaactgcagcaaatcccatagggatagaccaaccaaaggccatacctaaaattaattgaggcaaattactaaaacgttttacaaaaggataaaaccatgcgagtgcaagtgcggcaatagataaccaaatggtcatggtatttaacgtaagcactaatccaaacgaaaacagcaccaagacaataaagataatcttgctctctttctccgttacagcaccactaggtaatggtctatttttagttctttcaacgttgccatcaatttttctgtcagcaaagtcatttattacacacccagcggcacgcatggaaaacacacctagagtaaatacaatcaggatatgccagtcaggaaagcctttagcggcgatccataatgcccaatacgttggccaaagtaataatagcgctccaataggcttatctatacgcattaaacggctatacgcctgccatttattgtgcgtcatacttccctccaattttagctccccctaactactgcttatatacaggtgatgcaggcaaaaacacctcagttaataataaaggtttatctgaaagctggaaacgggaacgacgtaaccaatgtccattttgttgcccaatatgaataaaatcacgacttaaggttgtttcctggaacagataacgtcctaatggcaccgtacgcaaattcactaattggcgatcttcacccgttaatgtctcttccggcactaatgttcgccctaataaccaaggtacattatccccacaaaggacgatttctcttagccaatagcgtcggctataaggtaaacacttttgttcatcagcaggctcgatatattcaataaaaccttcttgatatggcattaccgtcacttgatggcaatgttgctcaaaacgtcgtgtcattgaacctaattccagcagccaacttaaggtattttctgcgacttcttcacgctcttcatctgataaccagtgaataggtgcgtgagtaattatggattttttaaacattctttcatcatcacaactatgatgatcctaactttataaatcattatgcactaaggatatcatgatgtagcgataggaagttaaaagctgataacatttcgtataaataatctaaaaaaacgttaaaagataatcagaattcactcaaattgagaaaaaacaaaggaggtcaccatcaacctccttggttataagcgcttaatcacacttaatttattctcttaacgccatgctttgtaacgattaattaaattatttgttgaactatcatgactgttaacactttccttaccttttaactctggcaatatgcgattagctaattgtttgcccaactcaacgccccattggtcaaaggtgaagatattgaaaattacaccttgtacaaagattttatgttcatacatcgcaattaacgcgcctaatgaatagggagtgatctcttttaaaagaatggagttggtgggacgattcccttcaaacactttaaatggtgccacataccccatggttgcaggatcttttcctgctgaggcaaactctgcatcgacttgctcacgagttttaccaaatgctaatgcttcggtttgtgcaaagaagttcgacattagttttgcatgatgatcagataatggattatggctgatcgctggtgcaataaaatcacaagggatcagtttggttccttgatgaattaattgataaaacgcatgctggccattagtccccggctctccccaaataataggtccggtttggtaactgactttgtttccatcacggtcgatatatttaccattggattccatattaccttgttggaagtaagcagcaaaacggtgcatatattgatcgtatggcagaatcgcttcagtttcggtaccaaaaaaattgttataccaaatgccaataagcgccaatatcatcggaatattattttcagcttcagtggttctaaagtgattatccatagcatgagcaccagacagtaactgctcaaagttgtcataaccaatagataatacaatggataaaccaattgctgaccataatgagtagcggccaccaacccaatcccaaaactcaaacatatttgcggtatcaataccaaatttttctacttcagcactattagttgataacgcaacaaagtgtttcgcgacaaaagcactctctttagccgcagataagaaccaatctcttgcagagtgtgcattagtcatggtttcttgtgtggtaaaggtttttgaagcaatcaagaatagcgttgtttctggatcgcattttttcaaggtttctgcaatatgtgtaccatcaacattagaaacaaaatgcatggtcaagtggtttttataagggcgcagtgcttctgtcaccatatacgggcctaaatcagaaccaccaataccgatattgaccacatcagtaatcgctttacctgtgtaacctttccattcaccactaatcacacgctcactaaatactttcattttatgcaatacagcattgacttctggcatcacatctttgccatcgaccataaccggtgtattgctacggttgcgtaatgcggtgtggagtaccgcacgatcttccgtacagttgattttttcaccgctaaacatgctctttatcgcaccagcaacatcacactctttagccagagcctgtaatttatctaatgtttcttgggtgatacggttttttgaaaaatcgactagaatttggtctgaaaacgttcttgaaaaggtgttaaagcgtgatggatcttgagagaacagtgttttcatttctgtatctttcatcacggcaaaatggtcttctaatgccttccaagctaaggtatgagttgggtttacatttttcattcacaatactctcttaagattacaatccgatactctcagattgtagcctgtcatttaatagttacggtcaattctttcttatttgatgatattcgtcaaaaccattcaacaaatctagtattaattacttacataggcaaaaccgataatctttgagtgattattaattaaattgattatccttcactcttgattgactcttttggcaataaccgatattcctaactgtgtttaacatctcactgggactaaaggaatacaacaatgaaagataatactgcaacaccttcatcaccttttactatcgccaaatttggtggcactagcgtggcaaattttgcggcgatggaaaagtgtgcagatattatcttaaaacagaaatcagtccgtgtggtggttctttctgcttcagcggggatcaccaatttacttatcgaacttgcgacaggtgttgacgcaacacaacgagccgctttattggctcaagttcgtgatattgaatacgccatcatcaatcaactatcacaagcagaaattatttctcaagaaataaaccgcttattggacaatattgaaatgctgtcagaagcggcagccttggcaacttctgatgcgttaaccgatgagttagtcagccacggtgaattgatgtcaacgttattgtttgttgaactgttacgtgaaaaaggaataagtgcagattggtttgatgtcagaaaagtaatgaaaaccaacgatctgttttgtcatgctgagccagatatggcgcaattaactgagttaacacaaagtttaattcagccccgcttaacagaaaccgtgattgttacccaaggttttatcggacaagagcctaaaggaaaaaccaccaccttaggacgtggcggaagtgattatactgcggcactgattggtgaagcattagggatgtcacgtgtcgatatttggactgatgtacctggtatttatagcactgatccaagaatagtcccacaagcacatcgtattgatcatattgcctttgatgaagcggctgaaatggcaacctttggtgctaaaattctccatcccgcaacgttattacctgcagtgcgtagtggcattcctgtgtttgtcggctcaagcaaagcaccagaagaaggtggtacattggtttgtgcacaaactgataatcctcctgtgtttcgtgccattgcactacgtagaaaccagacactacttaccctgcatagtttgaaaatgcttcatgcccgtggttttttggcagaaatatttaccattttatcacgccaccatatttcggttgatgtgataaccacatcagaagtcagtattgctttaacattggataccacaggtaccactagctcatcaggcagtctgttaactaatgctttattaacagaattatccgcattatgtcgcgtggaagtagaagaagatctggcattggtcgctatcattggtaattcactatcgcaagtaaatggcttaggaagccagatttttggcactttagaggattataatattagaatgataagtcatggtgcgagtacccataacttatgtttattagtggatggcaaagatgcagataatattgtcagaaaactacacgacaccttattttaacttattacttagtaaatatttatagaataaatataaacaacataagattaagatatggaaatagaataacaacatttcaatgactttagaatttaacataggcttcttgcaataaggagcctatgttatttatttttacagtaaaaatgacttatatttaaaattattatatttaaaaataatatagagtatttttaatttattttatcatctttaagagggagttatgtctataaaattaagctatgatatttgtaaaactgtccaatatatgcatgtgaacgttataaataagagtaaaaaattaaaagaactacgaaatgaaataaaatcactatataatctatcacaaccttttcaaaattcatgtgttaatactcatactttttataaaccacaaaatagcatcacagcctcaatagcaaatatcaataatagaattaataaaaatcaacacgcacttacaggaatagaatcaaaattaaaagaaaaatacaatgatataaaatcaattaatgatttaattaaaaatagatataaatcaggtttagttacaaatgagcatgactataaaaacatgaaaaatgttttaacaaacaattttaaaagtgaaataaatgatttaaatcaacaaaaagaaatactaaaaattagattaaatgaaaatgaaaatacacttgcatattttaacaataaatcagattttctttcatatcctaatcaagaaactctcaattttttgttctatactgaagttttccccaacagaatcgaaagagaatcaataccaaaagaaaaaatcaatattgattgtatcaacaatatgataaacatccataaaaagagtttgtttatcagttcagagaacaaagaaaaaataaacacatataaagaatttttaaaaaaataaatatacctttctaacaatatccaaccctattacagtattaacgtaagcggatgcctttcgatagaaagatccgctttttattttttaataaactcgataaccaccatattttttagcaaattgattaaatttaccaaaatcaatcaacgcgatttctaacgagcgataggcaatatgagacatcttagccacttgttccacaaatacatggttatcttcaagaagcttagctgtaagtgctgaggcaataatctcacactctttcggtgtcacaatccaaccatcatttgtagcaaacttataaattggaatacacccttctttttcactctctttagctaacaatgcctcttcttcttgcatagcttgcttaaatagtgtgatctcttcttctaggggggctggatgtgtaggaatatgatgataaatatagtcaccaatttcttccatgcgcgccggtgtcatttcagccttaagccaaatcttatcaaacattttttcatctaataatgcatctgtatccaaattccctgttaattgcatcagatttaaaaacgcattaatgataacttcatttaatgggtaatttcctttggctaaagaaggaaaaggaactttagtgccaactgttggggtttgctgaagatacaaagtataactcatcatcatgtccttttttctgatacaggcttacagcttatacatctttaatgggaactgcgagagaaaataacaaggggatatgattatcaccttgttatttattacattattataatcttcagataccgtttaattaaggctcatagcctaaattaggggctaaccaacgttccacttcacttatactcataccacgacgtttggcgtaatcttctacctgatctttttgaatttgagcgacggcaaaatatttactttcaggatgactaaaataccaacccgataccgaagcccccggccacatcgcataagcatcagtaagcttcataccaatgcgattttctacatttaacagttgccaaatttttgctttttctgtgtgctctgggcaagctggatatcccggtgcaggtcgtgttccttgatatttttctctaatcaactcgtcattagagagcgcttcgtcaggactgtaaccccaaatcttggttctcacttgttgatgcaaatattcggcaaaagcttctgcaagacgatcggatagcgcttttaccataattttattgtaatcatcatgagcattatcatacccattagcgagtgcatcttcttctagaccgccggtaactgcaaaagcaccaaaatagtcagcaagaccactatccacaggggcaataaagtctgctaagcaatagttagggtactcttttttttctgtttgttggcgtaaatgacaacaacgtaatagctcatgctgtcgcgtttcatcttggtaaataataatgtcatcaccaaggcgattagcagggaataaaccaacgatacctttcggagtcagtaatttttcacgactgagtttatccaacatggcattcgcatctgcaaaaacgcgtcttgcctcttctccgacaacctcatcttctaatatacgtggatatttccccgccaatgaccaagtcataaagaaaggtgtccagtcgatatacttacgtaaagtttcaatattggctgtaacttgttgtacccctaattggttcggcttaggtggcgtatagtgttgccagtcaagctgcaatgcattggcacgagctgtcgctaaggaaacgggaggcgtacgcggtttttttctcgcatactgctgacgtaccacttcatattcatggcgtgttttagcgacaaaatcagccttttgtgtggccgataataatgcagcgaccaccccgaccgttcttgacgcattctgcacataaacggttgggtggctgtaattaggttcaatttttactgccgtgtgcgctttcgatgttgtcgcaccaccaatcattaaaggaagagaaaaaccgcgtctttccatctccttagcaacattcaccatctcatccagtgatggagtgatcaatccagacaatccaataatatcaacattttcgtcaatggctgtttgcaagattttatcgcaaggtaccatgacccccagatcgataatttcatagttattacattgcaacaccactccgacaatatttttgccaatgtcgtggacatctccctttactgtcgccagtaacacttttcctgccgagctgcctgctttttttgtcgcttgaatataaggttcaaggtaagctacggcctgtttcatcacccgtgccgattttactacttggggtaaaaacattttaccttcaccaaacagatcgcccactgtgttcatgccattcattaatggcccttctatcacttcgataggactcgaagcttgttggcggcacgcttcggtatcttcaatgataaattcggtgatccctttcactaacgcgtactctaggcgcttttcgacctcccattgtcgccattgcgcaagcgtagagtgctgttcctcacttttagtaccacgataacgctctgcgagtgccagtaaattatcagtactctctgcatggcgatttaaaataacatcctctaccgcattacgtagttcatccggtaatgagtcataaatagcgagctgcccagcattgacaatccccatatccataccattttttacagcgtaatagagaaaaacggagtggatagcttcccgaacgggatcattgccccgaaaagagaatgacacattagaaacaccgccagaaattaaagcataaggcagttgagatttaatatccgcacaaacttctataaaatcaactgcataattattatgttcagcaatacccgttgctacagcaaaaatattgggatcaaaaataatatcttctggtggaaatccagctttttcagttaatagataatacgcacgccgacaaatttttatttttcgctctcgagtatctgcttgccctatttcatcaaacgccatcacgacaaccgcagcaccatacttacgaactaattttgcatgctcaataaaaagggcttccccttctttcatcgaaatcgaattgactattcccttaccctgaatacatttcaatccttcctcaatgacttgccattttgacgaatcaatcataatcgggactttggcaatatcgggttcacccgcaataagattaagaaaacgtgtcattgcttctatcgcatctaacatgccttcatccatattgatatcgatgatttgagcaccgttttcaacttgctgacgagcaacatcaagggcttcttggtaattaccttcttttattaaacgtttaaatttagccgaacctgtcacattcgttcgttcccccacattgacgaacagcgaattatcatcaatgaccaaaggctcaagacctgagagtcgacaggcttttttaatgacaggtaatgttctaggtgctatgccatcaaccgcttgagcaatagcctgaatatgggcaggggttgtgccacaacaaccaccgacaatattaagaaacccagcttgcgcccactccttgatttgttccgccatctcattggcatctaaatcatatccgccaaaggcattaggtaagccagcattagggtgagcactgacataagtttctgatatttgggagagagtttgaatatattggcgtaattcttttggccctagcgcacaatttaaaccaaatgataacgcgtcggcatgacgtagtgagtgataaaaggcttctgtggtttgccctgttaatgttctacctgacgcatcagtgatagtccctgagatcatcaccggtaattcaatattaagattatcaaactcacatttaatcgcaaaaatagccgctttagcatttagggtgtcaaaaatggtttccaccataattaaatccacccctcctttaatgagtccgcagatcgcctctcgataagccatcaccaatgtatcaaatgagatattacgaaacgcgggatcgttaacatccggagaaatggatgctgttctattggttggccctaatacccctgcaacataacgtggtttatctggcgttaatgcactccatttatcagcacaggctctggcaagtttagcagcctcttcattcaattctgcacataacccttccatctgataatcagccatggcaatagaggttgcattaaaggtgtttgtttccacgatatctgcaccggcttcaaaataagcattatgaatttcagtaatgatctgcggctgcgtcaagactaaaaggtcattattccctttaacatcacattgccaatgggcaaaacgttcacctcggtaatcttcttctgccagctgatattgctggatcatggttcccattgcgccatcaaggactaagatacgtttggctaatgcttgcgtaagctgctgagttatcatggtcacattgcttcctctaccaaagaatattgtgttgttgttattttcgttatatagcaagttcgttgtttttttatcctatcatatctctttgcaaagattcctaagaggaatatgagagattttcacctaaccataacccgataacatcaatatttgttttcatatgctttgttttgaaaaatatacagatcagaggagttttattacgttatataggtcataatagaggataatatggacagtatttctggagtgtaagtatgaccgtcttccctaccaataaaaaagctcgtaagccaaaaacacccgcaactcaaagtactgcacaaggtggccccgttcagtcattaagccgtggcttaacattattggaatatatttccgaatctccaggcggtattgctttaactgatttagcttttcaagcaggactacccaattccactactcaccgcttacttactactttgcaacaacatggttttgtacgccaagtaggtgatttaggtttatgggtagtgggcactcatgcctttattgtcggtagtagctttctgcaaacccgtaacctactggttatggtgcaccctatattgcgtcaattaatggaagattctggtgaaaccgttaatttggctattcttgatcaagttgaatttgatgcggtgattgtcgaccaagtacaatgtaatgcattaatgagaatgtctgccccaattggcggcaagttgccaatgcatgcatctggtgcaggtaaagcatttctatccactttaccggaaaataagttactcccccttttacagaaaaaaggtctgatggcctataccccttataccaaaaccttaccttccgcattaaaagagaatttagaacaagctcgtaaacaaggtttctcttttgatgatgaagagcatgcattaggtttacgttgtattggcgcttgtatctatgatgaacaccaccagccttttgccgctatttcactctctggccccgtatctagaatgacagattcacgcattacggaattaggtgcactggtgataaaagcggctaagcagatcagccgtgaatatggtggtgtaaaaagttaacccagctaggcctttctatttatttatgtacaaattaggaaggcttctccttaaataaaacgattcagcttatgcaaaaatcgttttttttcatttttagccgttaaatattaaaaaactgttacttatcatcttaaaaaattgatatcgatcacagatgttgtttaagcttggtttaagagtattgcaactgagcttgttacccgtaacaatgttaccggtaacaagttattgctaagcgcttatattttttcttatagcaataagtaatgccgtcaccctgtgtgaataaaggaagcactattatgaacccgaaaaatcatgaccagtttcagaacaacttcgccgcattaaacgaaaccgtacaacaagtgactgaacgtattgttgctcgctcacaaataactcgtcgcgcttatctgaaaaaaattgaagctgctaaaagccaaaccgtacaccgtgcccagttagcttgcggtaatttggctcatggttttgccgcctgtcaaagtgaagataaaaatttacttaagaatatggttcataatgatatcgccatcattactgcgtataacgatatgttatccgctcataaaccttatgaagattatccacaaaaaattaaagcggcattgcatactgttggtgctgtaggtcaagtcgctggtggtgtgcctgcgatgtgtgatggtgtgacacaagggcaagatggaatggagctatcactgctaagtcgcgatgttattgccatgtctgcagctgtagggttatctcataatatgtttgatggcgccctttatttagggatctgcgataaaatcgttccagggcttactatggcagcactgtcattcggtcatctgcctgcaatttttgtccctgcaggtccaatgaccagtggtttacccaataaagaaaaggtgcgtattcgccaactgtatgcagaaggcaaggtcgatcgtaatgctttattagaagcagaagcagcctcttaccatagtatgggaacttgtactttttatggtacagcaaactccaatcaaatggtgatggaggcaatgggcttacatttacctggctcctcttttgttcacccagatactccattacgtgaagcattaacagaagcggcagcaaaacaaattgtacgcttaacagaaaactcggggaattatttacctattggtcaattagttgacgaaaaggtgattgttaacggtattattgtgctgttagccacaggtggctcaacaaatctcaccatgcatttagtggcaatggcacgggcggcgggcattatgattaattgggatgatttttctcaattatcacaagttgtgccattaattgctcgtatttatcctaatggtccggcagatattaaccaattccaagcggcaggtggtcttgctcttattattcgtgaattactgaaaaaaggcttaattcatcgcgatgtcaatacggtggcaggatttggtattgaacgctataccttagagccgtggctaaatgaaggtaaacttgattggcgtgaaggtgcaatacaatctttagataaagatgtgattgccgatatcaatacgccattctcttcacacggcggaacacaggtgatggaaggtaatttaggtcgagcagtgatgaaaacgtcggcggtgcctgatgaaaataaaattattgaagcacctgctgttgtgtttaatagccaacatgatattgccgctaaatttagcgccggtgaattgaataaagattgtgtagtcgttgtgcgttatcaaggtccccaagccaatgggatgccagaattacataaactcatgcctcctttaggggtattgatggataaaggctataaagtggcattagtcacagatggccgtctttctggtgcatcaggtaaagttcctgccgctattcatgtaacaccagaggcggtaaacggtggactattagcaaaagtacaagatggtgacattattcgtgttaatggcaaaacaggtgaattaacactcttagttgatgaacaaaccttagaagctcgccaaaccgaaatacctgatctcagcgcaaacaatagcggttgcggtcgtgagttgttcgttaatttacgtcgccatttatcaggtgctgaacaaggtgcttgctgtattgatttttaatacataaagttttcattgcctaatgaggagcaagcctatttatttgctcttcattatttctgattaggaaagataaagatgaatcattggaatacaagtgcagagtctgtactaaaatcagggcccgttgttcctgttattgttattaatcatattgaagaagctgtacctgtcgcaaaagcgttagtcgccggtggcgtaaaagttttagaagtgacactacgtacagactgcgctattgaagctattcgtcgtattgctaaagaagtaccagaagccattgttggtgcagggacagtgatcaaccctcaacaattagcccaagtcacagaagcgggtgcacaatttgccattagcccaggcttaaccgatgcgctattaaaagctgcggtagcaggctctattcctcttatccctggtatctcgactgtttctgaattaatgctcggtatgagttacggtttaaatgaatttaagtttttcccagcagaagctaatggtggcgttaaagcattaaaagcaattgcagggccattctcacaagtacgtttctgcccaactggcggtatttcgcctgaaaactaccgtaactaccttgcactggaaagtgtactttgtatcggtggctcttggttagttccaagtgatgccgtgaaagcaggagattatcaacgtattactgagctagcaaaagaagctgttgctggcgctcaacattaatttaatgctttaattattacccaataaagataggtatatcattcgattatctatctttattactctgttttattaacagatatcgttatcaataaaacgtttactttgtggataggcgtaaacatcttcaatatacccttgtttaattctttgctgctgttgttgccagtattcaggtgaaagaagatcacgatgttgagcttcaaaataatgacatacttgcttatcacaacataaaaagtaacgaaactcttcaggaaaaacatcattttcagcaacgctataccaaggctcactggccagttcatcttcaggatagcgagagggaggaatagcacggaaattcatatctgtcatataacttatttcatcataatcataaaaaataactcgatgatgacgtgtcacgccaaaattcttaaataacatatcaccaggaaaaatatttgcggcaatcaactctttaagtgcttggccataatcttcaaccacggcttttaactgtttatcgtcacactgctccatatagatattaagtggcgtcatacggcgttccatatacagatggctgatcagtaacttatcacctagatcttctaatttgttggggatctcctgttctaagatcgccattaagtcgttactgatccgctttttatcaataacaaagttctcaaactcttgcgtatccgccattctcccaacacgatcatgctctttcaccaagcgatagcactctttgacacgctctgcagtcattgttttttgtggcgcaaacctatctttgatcactttaaacactctatcgtaagtaggcagtgtgaaaacgagcatcaccattccttttacccccggagcttcaataaattgttccgatgaaaaattcataaaagcaaggtattcacggtaatattcagttttgccatgtttctgacaaccaatcgacatatagagctcagcaatagacttttcagggagaatatcccgtaaccatgttactaatgccgcgggaaatggcgcataaaccataaaataagaacgagcaaagccaaatacaatactggcttcatctgttgtcgttaaacaggtatcaataactaagtgctgttcaatattatgaataggtaataacaggggaatgaattgattatttatcgctatcttaccaatcatccatgccgctttattacggtaaaatagctcattagcaatgtgaaataccgcattttgtaattcctcatggctaaattgcgcatagagcgtttggcaaataaattgaatatctcgcgatttattttgccacggtaaacgcaaaggtaggcgcgataaaatatcttgcaataatgcgggtaaatcactttgtataacaaacgttcttgataaagggcgaggggcttgcgcaaaacgatacgcaggttgtgatgaaaaaacgaataagttttttttattaagctctcgatgatgaaatagacgacaatagactgaattaaaaaaactttcagcaatttcaaaacggggatagttaggtaataattgtgtgtatcgctctttgactttttgtaagaaaacactttctttatcaatatcatgtcggatacatctaagttgttccacaactaatccaacatgattatcgtataagcggatgcgctctttcatcgccaattgaataccatgccaatctgcttgctcaaaacgatattgagcacctgacgttatctcaagaaaacgcccatattgtgcatcaaagccttgtaagatcgtttgagcgactaagtcttcagctgtcatcaactgacctcatgaaaaagaggagcatcctgctcctgaattatcaccacaaaagtgcatcacagtaaggactagaattgttgctcttcagtagagccagttaatgccgtaacagatgacataccaccttgaataatcgtcgtcactttatcaaaatagccggtgcccacttcttgttgatgagatgagaaggtgtagcctttcgatagtgcagcaaattctttttcttgtaccttttcaacatagtgtttcataccttcacctttagcgtaatcatgcgctaaatcgaacatattgaaccacatactatgaatacccgctaaagtgataaactggaatttataccccatcgcagaaagctcatcttggaaatgggcgatcgtgctatcgtcaagattctttttccagttaaaagatggagagcaattatacgctaacattttaccgggatatttatcatggatcgcttcggcaaatttagccgccattttcagatctggcgtggaagtctcacaccagaccaaatcggcataaggggcataagcaagccctcgactaatggcttgctcaattcctgcatgagtacagaaaaaaccttcagcggtacgctcaccagttaaaaatgaactatcgtaaggatcgcaatctgaagttaagagatcggccgcatccgcatcagttctggcaaccaataaggtaggaacatccgaaacatctgccgctaaacgtgctgccaccagcttttgcacagcctcttgcgtaggtactaagacttttccgcccatatgaccgcattttttcactgcggctaactgatcttcaaagtgaacgcctgctgcacccgcctcaatcattgctttcattaattcaaatgcgttaagtacaccaccaaaacccgcttctgcatcagcaacaataggaaggaaaaaatcaatataatctttatgctgagggccgataccatttgaccactgaatttgatcagctcgtctaaacgtattattaatacgctgaacaacattgggtacagagtccaccgggtataaagattgatcagggtacatactggcagcagtattcgcatcagccgccacttgccaaccagatagataaatggcttctaatcccgctttagcttgctgtaatgcttgccctcctgttaaagcacctaatgcattgacatatcccttcttcgacttaccatttaatgatgaccaaagccgttgcgcaccacgtcttgctaaggtatgttcagggttaacggaacctcgtaatttaatgacatcttctgcgctataaggacgtttgatccctttccagcgaggttgttcccactctttttctaattgggcaatctgctctgatctactcatagacataaaataactcctataaatctggtagtgatgatgttttatatttgcagtttataaatacgttatgacgtatcttttttaatttaaaagttgataacccggtaaagtcagaaaatcgactaattcatcttgggtagtaatgttatccattaaggtcgctgcttctttaaaacgaccttgctcaaagcgggtatcacccacttcttggcgaattacctccagctcttctttcaacatgttgcgaaaaagcgcttttgttacaatctgtccatccgataatggtttttgatgacggatccattgccaaatagaggttcgagatatctctgccgtggcggcatcttccattagcccataaataggcacacaaccattacctgagatccacgcttcaatatattgcacagcaacacggatattcgctctcattcctgttgctgttctttcaccttcacaaggggccaataacatttctgcggtgatcttttcatgacgttgtacatcaagttggtttgctcgctctcctaataccgcatcaaacgcagataacaccgtttcggctaatccagggtgagctatccaagtaccatcatgaccattagttgcttcaagctctttatcctcaaataccttttgtaaaatgacaccattttgctccgcagagcgactggggataaaagcagacattcctcccatcgcaaatgcaccacgtttatgacaagtttgaataagtagtcgggaataagcacttaagaaaggttgagtcatagtaataccctgtctatccggtaacacacgatcagggtaattcttcaacgttttgatatagctaaagatataatcccaacgtccacaattaaggcccacaatatgctctttcatatggaataagatctcttccatttgaaataccgcaggtaaagtttcaattaatactgtggctttaatagttccgctggctaaaccgaagcgtttttcagtgaaatgaaaaacatcactccaccattttgcctcttgccaagtttgtaatttaggaatgtaaaaataaggcccgctgccctttgcctgtaatgttttatagttatggtaaaaatataaggcaaaatcaaacaagcacccaggaataggttttccctgccatagcacatgcttctctggcaagtgtaatcccctgactcgagcaattaacaccgcaggcgatgcttttagttgatagcacttaccttgttcattggtgtaggaaattgttcctttgacagcatcacgtaaattaatttggccatcaataaccttatcccatgtcggggcaagtgaatcctcaaaatctgccataaatacttttacattagcatttaatgcattgatcaccattttacgatctacggggcctgtaatttcgacccgacgatcttgcaagtctttaggaattggattcactttccattctgagtttataatggaatctgattctgaaataaaatcaggaagcattccattatccactttttgtttccaaatttctctttctgctaataaggtgtcacgacgttctgaaaactgactgaccaaattagtcaaaaatgactcaacatcatgatttaatatctctttttcagctatcccaaaaggttttgtgaagcttaatgcttctgtagttaatgattgtgacattctgcattcccctaaaatcttttacacacctgattaagattaatgcagtttttacaaaaatcaaaaatgaattccatttttatttaaacattttttaacaatgtgattacaccaatgttttttggctgaataaaaatggctatttcaaaaataactcgagtgatcttggtttgttgaatgattaaacaaactaagatcatgcgaagatcacataaagctcggcttataacatttacttatatgaatattcttcatatacagcatctacacctcgacttttagatctgaattggctaaattcaggcttctagatgtctagatgtttttttagaggttattgagatgccaatcagagtaccagacgaactacccgcagtgagttgtttacgcaatgagaatgtctttgtcatgacatcaagtagagcgagtattcaagatattcgtcctttaaaagtactgttactcaatctgatgcccaaaaaaatagaaacagaaaatcaatttctacgattgctctctaatagtccattacaaattgatatccaattattgcgtattgattctcgtgttcccaaaaatacacctgttgagcatcttgatactttttattgtgattttgcccaaattaaagaacagaattttgatggcttgattgtaacgggagcaccattaggtttagttgaatttgaagatgtggcttattgggaggaaataaaagaaatcattacatgggcaaaagagcatgttacttcaacactttttatttgctgggccgctcaagcgggcctaaatattttatatgacttacctaaatataccttaaaacaaaaaatttctggggtatatcgtcatacaacatgtgatcctttcgcgttactgactcgtgggtttgatgaaacattctttgcccctcattcacgttatgctggttttcctgttgagtttattcaacaaaatacagatttagaaatattagcaacatcagagcaagcaggggcttacctattcgcatctaaagataaacgtgttgtctttgccacaggtcacccagaatacgatcccaatacattagctgacgaatatcatcgtgatgttaaagctggattagcaccacaactacctgaaaattattttcccgataataatcctaataaaaaacctcttgtatcttggcgtagtcatggccatttactctttgcaaattggctaaattattatgtttatcaaattacaccatttgatctggcacagatgaacccaactttagattaaaataaaaccccaaattcaatttatttggggttttatattcaaaaaaaatacttgagattatttatagcgatgcgctaatgcattcgctgcaatcattgcgttgtagacatcttcttcagtcactttcataggcatattgcccatggtatcaccttctgcacaagcaattttcgctacattacgccattcactttcaataaactctttcattcccatatcttcaagcgttaatggcaattcagccgctttgataatacgaataacttcatcaatttcttcttgtggcgcattttctaacactaattgtgttaataatccaaataccactttttcaccatgttgcacatgatgtaaggaagcaactgcagacataccattattgaccgcatgagcggctgctaaaccacctgcttcagcccccacaccacttaaataaatagtcgcttcaatagtttgctctaaagcttgtgtggtaattttatggcgcacagcatccattgctttatcaatattttcactcaatatttcaaaacacaattgtgctagacctaaacctgtacgtgatggacgttgattaactaaattaagtccatcagcttgatagcaagcacgtgcttcaaaataagtggctaaagcatcaccgacacctgcagagaagaagcgttgtggtgcagaagcaataatcgcggtatccgcaatcaccatatcagggttctgaggtaaaaataagtatttatcaaattcaccattttctttataaagaacagaaagagccgtacaaggcgcatctgtagaagcaatcgttgggaataaaataacagggaggtgatgataataagcaaccgctttagatacgtctaatgttttaccgccaccgataccgataataacattcgctttattttcaacaacaattttacccaagcgatccacttcagcttctgtacattcgtaattaaatttttcaacgaaaccagatagcccattttctttaattgacgacaaagcttctttatttactttttctaggaaaaattcatcgctgataataaaagcattatctccgaaatctttcatataattaccaacagaagcaagtaattgactaccaataaagaattttttaggggatgttacagagcgaggtaatatagaagacataactaaattcctttatttagattttgctacagtaagtagcagaattaacatttatcttacccctcatcagaattcgaatctagtaaactctgtaatagatattatcaatatattctatttagtttaaagaaaacaacatgttaataaaataataaattttatagaatggcaagatagcttatcgtaaagaagataatttcccttaaaacttcaattaaacctagaaaactaaacaactatattatgatgttatcagtagcgttacccactaataccattaaaggaacaacacaattaaccattatttgatatacatgcatggtatattcgcgttataactctcttttatttttaccaaggtgatttttgtgaaagacgccgtgatcctcgttgataaaaatgacaatgagctaggaaccatgcccaagctggaggcacatattgctggtgccttacatagagccttttcattatttattttcaattctaagcaacaaatgttgatccagcaacgagcactgactaaatatcactctggtggtctatgggcgaatacttgttgtagccatcctttacccaatgaacctctatcacaagcaatacatcggcgtttaaatgaagaattaggtatgcagtgtgatatgcaacctattggtacgattttatataatgagaaagtcacggatgatcttattgagcatgagtttgatcatctttttttaggctttagtgataaaacaccacagtgtcatcccgatgaagttatggatcatcgttggatttcattaaacgagctttatcatgatgtagaaaaacatcctgaaaactatagtgcatggttctgccatatattaatggctcttggtatagagcagtttactcgatggagtaaaaatattacttagttgctctcttattgaaattgatacttaactataaaaaagtgttagcatgactcaaggtaaaatacgatcttctaaacgcaaaaaagccaacccattgggttggctttctcgtcttatttaatgcttggcagttccctactctcacatggggagaccccacactaccatcggcgctacggcgtttcacttctgagttcggcatgggatcaggtgggaccaccgcgctatggccgccaagcaaattctgttttaatcactcgcttctttcctttcggtaagtcgccagtaattcaatcttaaacaagctgactttatcgtttcgtctctctgacaaaacactttcggtgttgtcaggttaagcctcacggttcattagtactggttagctcaacgtatcgctacgcttacacacccagcctatcaacgtcttagtcttaaacgttcctttaggtcacttaaagtgacagggaagactcatctcgaggcaagtttcccgcttagatgctttcagcggttatctcttccgcacttagctaccgggcaatgccattggcatgacaacccgaacaccagtggtgcgttcactccggtcctctcgtactaggagcaacccctctcaatcttccaacgcccacggcagatagggaccgaactgtctcacgacgttctaaacccagctcgcgtaccactttaaatggcgaacagccatacccttgggacctacttcagccccaggatgtgatgagccgacatcgaggtgccaaacaccgccgtcgatatgaactcttgggcggtatcagcctgttatccccggagtaccttttatccgttgagcgatggcccttccattcagaaccaccggatcactaagacctactttcgtacctgctcgagccgtcactctcgcagtcaagctggcttatgcctttgcactaaccgcatgatgtccgaccatgcttagccaaccttcgtgctcctccgttactctttaggaggagaccgccccagtcaaactacccaccagacacggtccccgacccagtttatgggcctaggttagaacatcaaacgttaaagggtggtatttcaaggttggctccatgcagactggcgtccacacttcaaagcctcccacctatcctacacatcaaggctcaatgttcagtgtcaagctatagtaaaggttcacggggtctttccgtcttgccgcgggtacactgcatcttcacagcgagttcaatttcactgagtctcgggtggagacagcctggccatcattacgccattcgtgcaggtcggaacttacccgacaaggaatttcgctaccttaggaccgttatagttacggccgccgtttactggggcttcgatcaggagcttcgccttgcggctgaccccatcaattaaccttccagcaccgggcaggcgtcacaccgtatacgtccactttcgtgtttgcacagtgctgtgtttttaataaacagttgcagccagctggtatcttcgactggcttcagcgccgtccgcgagggactttacctaccgccagcgtgccttctcccgaagttacggcaccattttgcctagttccttcacccgagttctctcaagcgcctgagtattctctacctgaccacctgtgtcggtttggggtacgattgttggtaacctgaagcttagaggcttttcctggaagcggggcatcaattgcttcaccaccttagtggttcgtcatcacatctcagcattaagtgaccggatttgcctaatcactctgcctacctgcttgaaccgggacgaccgtcgcccggacaacctagccttctccgttcccccatcgcagttaccaccagtacgggaatattaacccgtttcccatcgactacgcttttcagcctcgccttaggggtcgactcaccctgccccgattaacgttggacaggaacccttggtcttccggcgtgcgggtttttcacccgcattatcgttacttatgtcagcattcgcacttctgatacctccagcatacctcacagtacaccttcgcaggcttacagaacgctcccctacccaacaacactatgtgtcgctgccgcagcttcggtgcatggtttagccccgttacatcttccgcgcgggccgactcgaccagtgagctattacgctttctttaaatgatggctgcttctaagccaacatcctggctgtctgagccttcccacttcgtttcccacttaaccatgactttgggaccttagctggcggtctgggttgtttccctcttcacgacggacgttagcacccgccgtgtgtctcccgtgataacattcttcggtattcgcagtttgcatcgagttggtaagtcgggatgaccccctagtcgaaacagtgctctacccccgaagatgagttcacgaggcgctacctaaatagctttcggggagaaccagctatctcccggtttgattggcctttcacccccatccacaagtcatccgctaatttttcaacattagtcggttcggtcctccagttagtgttacccaaccttcaacctgcccatggatagatcaccgggtttcgggtctataccctgcaactcattcgcccagttaagactcggtttccctacggctcccctatgcggttaaccttgctacagaatataagtcgctgacccattatacaaaaggtacgcagtcaccccataaagaggctcctactgcttgtacgtacacggtttcaggttctttttcactcccctcgccggggttcttttcgcctttccctcacggtactggttcactatcggtcaatcaggagtatttagccttggaggatggtccccccatattcagacaggataacacgtgtcccgccctactcgtcgagttcacaataacagcatcttcagatacggggctatcaccctttactgccggactttccagaccgttctcctgacactgctattgattaagactctgggctgctccccgttcgctcgccgctactaggggaatctcggttgatttcttttcctcggggtactgagatgtttcagttctcccggttcgcctcattaacctatggattcagttaatgatagtatccattggatactgggtttccccattcggatatcgtcgggtataacggttcatatcaccttaccgacgcttttcgcagattagcacgtccttcatcgcctctgattgcctaggcatccaccgtgtacgcttattcgcttaacctcacaacccgaaagtgtctctttcaaagactatctgggtggtgatggctgcgcagattacatttcttcgttgggcagtgctcgcaatgctcacatacttaagtatgctgcgcttgctgtgcgctgtccgcctcgaactgtaaattgctcgctcatcccactttgatgtcaaaacacattcaaagtttgagattttgagagactcatcaatatacctcggtgatatattgatttgttttcaatttttcagcttgttccagattgttaaagagcataataattcgcagtatactattcctaatatactctgaatcattgttttatatccaagagattatggtggagctaagcgggatcgaaccgctgacctcctgcgtgcaaggcaggcgctctcccagctgagctatagccccataatgttttaatacccgtataaccactcctttttcttcttataataagaagctttttctttaggcaaggcgtggagtaacgaagtttacttaatgtaaacgagttgcttcacaacacagcataaaggaaaagtggtaggcctgagtggacttgaaccaccgacctcacccttatcaggggtgcgctctaaccacctgagctacaagcctataccggtatctctgctcgttcttcatcagacaatctgtgtgagcacttcacataacacgtatctcttaggtaaggaggtgatccaaccgcaggttcccctacggttaccttgttacgacttcaccccagtcatgaatcacaaagtggtaagcgccctcccgaaggttaagctacctacttcttttgcaacccactcccatggtgtgacgggcggtgtgtacaaggcccgggaacgtattcaccgtagcattctgatctacgattactagcgattccgacttcatggagtcgagttgcagactccaatccggactacgacagactttatgagttccgcttgctctcgcgaggtcgcttctctttgtatctgccattgtagcacgtgtgtagccctactcgtaagggccatgatgacttgacgtcatccccaccttcctccggtttatcaccggcagtctcctttgagttcccaccattacgtgctggcaacaaaggataagggttgcgctcgttgcgggacttaacccaacatttcacaacacgagctgacgacagccatgcagcacctgtctcagcgttcccgaaggcactcctctatctctaaaggattcgctggatgtcaagagtaggtaaggttcttcgcgttgcatcgaattaaaccacatgctccaccgcttgtgcgggcccccgtcaattcatttgagttttaaccttgcggccgtactccccaggcggtcgatttaacgcgttagctccagaagccacggttcaagaccacaacctctaaatcgacatcgtttacagcgtggactaccagggtatctaatcctgtttgctccccacgctttcgcacctgagcgtcagtctttgtccagggggccgccttcgccaccggtattcctccacatctctacgcatttcaccgctacacatggaattctacccccctctacaagactctagccaaccagtttcagatgcaattcccaagttaagctcggggctttcacatctgacttaattgaccgcctgcgtgcgctttacgcccagtaattccgattaacgcttgcaccctccgtattaccgcggctgctggcacggagttagccggtgcttcttctgcgggtaacgtcaattgacaagggtattaaccttatcaccttcctccccgctgaaagtactttacaaccctaaggccttcttcatacacgcggcatggctgcatcaggcttgcgcccattgtgcaatattccccactgctgcctcccgtaggagtctgggccgtgtctcagtcccagtgtggctgatcatcctctcagaccagctagagatcgtcgcctaggtgagcctttaccccacctactagctaatcccatatgggttcatccgatagtgcaaggtccgaagagcccctgctttggtccgtagacattatgcggtattagccaccgtttccagtagttatccccctctatcgggcagatccccatacattactcacccgtccgccgctcgtcagcaagaaagcaagctttctcctgttaccgctcgacttgcatgtgttaggcctgccgccagcgttcaatctgagccatgatcaaactcttcaattaaaagtgtttgatgctcaaagaaatcgaaaacttagcttattcattatatgaattaacttgttagtcactcttcaagacttgatacatctaattttttagaagatatcgtctctgcgagtgcccacacagattgtctgataatttgttaaagagcagtgcaactgtcgctgccgtttccggtcttctgcgttgttgcgaggaggtgcattctacatcttcctcattcagtgtcaagcgctaatttattaggcttttcactttttattttgttctctcagccagttcgcttagcgccctgtgccgtgacaacgaggacgcattatagggagttttctgaggctggcaatagtttttttaagaaaaaaattcgtttgcttaattccacagcaaaacccttagttatacgcagttatcaacaattttatccacaagccatcttttcccacaaatttagcatgtcaaacgcaaacgtttgcgttattataatacccaaatgagtgagattgattttgtcttcatcttctgaaatgttagtggtgcaaacacaatttcactgtatcaacgtgacttttcatcacaatgactactgttatacaaaaacccaagggataaaactcatgcaacaccttcgtcctatccgccgtgctcttttaagtgtgtctgataaagcaggtattttagaatttgcgaaagcgcttgtagaaagaaatgtagaacttttatcaacaggagggacagcgcgtctattagcagaagctggcttacccgttatagaagtctctgactacaccggttttccagaaatgatggatggtcgtgtaaaaacacttcaccctaaagtacatggtggtattttaggacgtcgtggacaagatgataccattatggaggaacatgatattcgtcctatcgacatggttgttgtcaatctttatcccttcgctaaaacagtagcccatcccgattgctcattagcagatgctgttgagaatattgatattggtggtcctaccatggttcgttccgcagcaaagaaccataaagacgtcaccattgtggttaatagcaatgactatgaaaaagtgattgaagaaatggacaatcaccaaaacagtctgactttagatacacgttttgatttagccattaaagcctttgagcataccgcagcttatgacagtatgattgcgaactactttggccaaaaagttgcaccttattatggtgatacttcacaaccatcaggaaccttccctcgtaccttaaatcttaactatataaagaaacaagatatgcgttatggtgagaatgctcatcagcaagcggctttctatatagaagagaatattgaagaagcctctatcgcaacagcaaatcaattacaaggtaaggcactctcttataacaatattgccgatactgatgctgcattggaatgcgtgaaatcattttccgaaccagcttgtgttatcgtgaaacatgcaaacccttgtggcgttgctattgcggacactctcacacaagcatatgacaatgcatttaaaactgatccaacttctgcatttggcggtattatcgctttcaatagaagcttagatgcaaaaacagcaagtgccgttatagagcgtcaatttgtcgaagtcattatcgcgccttctattaatgaagatgctctacctattttagcaaccaaacctaatgttcgtgtattagcctgtggtgaatggcaagaagctaaacctgcacttgatttcaaacgggttaacggaggcttattagtacaagatcgtgatttaggtatggttaaagaagaaaacctaagggttgtcacgcaacgccagcctagtgaacgagaatggaaagatgcgctattttgctggaaagttgcaaaatttgtgaaatccaacgcaattgtgtatgccaaaaatgacatgacgattggcattggtgcgggccaaatgagccgagtctattctgctaaaatagcagggattaaagcggctgatgaaggtttagaagtggcaggttgcgccatggcatctgatgcattctttccctttagagatggtattgatgcggcagctatggccggtgtaacttgtgttattcagccaggtggttctattcgtgatgatgaagtaattgcagcagctaatgaacacaatatcgcgatgatttttactaacatgcgtcattttcgccattaataagggattgctatgaaaattttaattattggtaatggtggtcgtgaacatgcactagcttggaaagcagcgcaatcgcctttagcaacccaagtgtttgttgcccccggtaatgcaggaacagcattagaacatggcgtacaaaacgttgatattagtgccactgatattgccgcattagttgcatttgcccagcaaaatcacattgatttaaccattgtggggcctgaggcaccattggtaattggtgtagtagatgcgttcaaacaagcgggactgatgatttttggccccaccaaaggtgcggcacaactagaaggttcgaaagcatttacaaaagattttttagcccgccatcatatcccaacggcagcttatcaaaactttactgaaatagcgcctgcacttgaatatctccataaagttggcacacctattgtgattaaagcggatggcctagctgcgggtaaaggtgtcattgttgccatgacacataccgaagcagaaaatgcgataaaagatatgttagcaggtaatgcctttggtgatgcaggacaccgtattgttattgaagaatttcttgatggagaagaagccagttttattgtcatggtggatggtgaaaatgtacttccgatggcaacaagtcaagatcataagcgcgtcggtgatggtgactcaggcccaaacaccggcggaatgggggcttattctcctgcaccggttgttactcctgaaatccaccagcaagtcatggataacatcatttatccaactgtcaaaggcatggctgccgaaggacatcgctatcaaggttttctttatgcaggcttaatgattgataagcaaggtattgccaaagtcattgagtttaactgccgttttggcgatccggaaacgcaacctattatgatgcgcatgcaatcagacttagttgatctctgtttagcgggtgcaaaaggcgaactagcaggtaaagactccatttgggatccccgccccgctttaggtgttgtaatggccgccggtggctatcctgataactaccgccaaaatgatattattgagggactaacagcaacatcttcttcaacagctaaggtatttcaagcaggaacaaaattaacggctcaaggtgaagttgttacagcaggaggccgagtattatgtgcaactgctttaggggaaaatatcgaacaagctcaaaagaatgcctatgctttagccaacagtattcactggtatggctgtttctatcgccatgatatcggctatcgtgccattgcgcgtttaaaaaagtaagttaaaacagcaaaagggagtgatcacaaactctcttttgttggttcccatttacaaaaatcgtgttctgcaaccattaacaactggttaccttcgggggaatccaaccaagcaacataagcgggacgagttagatgctgtgttctacgttttagccaacgttgttctggtgcttcaaatgatacattcactttttcacccgcacatgttgtcaatgtatcttgataccaggttccttgaactagctttacctgacctattgccaatgccttactgatctctcgttctcgactggctgcaaataccatttttaaacgttcatcttctgttaatgggcgcttttgtccttgatactcttgttgcataaagataacttcgccacgtttatttaaacgtaaatgccaagaggaaggatgggagggattaacgatttcactgcgaatttgccataatctattttggcggtactcataaaaagtgacaacagtttcaggcttttgataaaagctatagacactcataatcacttgaggctctgatgttttgttatttaaacgccaaagccgcacaaccccttcatctgcaatatagcccgttgcagaaaattcgggtagttgtggagaagaagagcaggcgctgagcaaaaaagagaaccctattgctaacagcccctgtcgtctcaacaaaaggggagcaactccccctctattgttcattccgttcaaaggaattattttactgcgtctttcagtgctttaccggcagtaaatgcaggaacgttagctgctgcaattttaatttctttgccagtttgagggttacgaccagtacgctctgcacggtgattcactttgaatgtaccgaaaccaactaactggacagaatcaccttctttcagagcacctgttactgagtcgataaacgcttcaatagcagcttttgcctgagtttttgtcagatccgctttttcagcaactgattcggttaattcagctttgttcataaaatagtccttaaagtatgttttatcgtttgaaaaacatctggtgaaaaaacttaattcatcttttttagagagtcagttaagcaaaacacctgagccacttcttttcgtacccaatgtagaacatacacgggggtaatgtgaagtctttaaacgtcgcttttcaagcactaaatcacgtttttctgatttagtgcgttaattctataccgatattgctcattccagattcgcgcaggtctgtacgcagaccttttattagttcaatatctctttcttcgcactcaacaagtaggcgataaatttcccattgaatatcgaactcttcagtgaccgcagcaagagattttaattcttcttcagacatttctctttctgcttgtgtcatttcaagtgtagcaacagttccaaccgaaattttgctcacttcaatagcatgactgagtgactcaccacttaaacgagaatgaataagctcactcagtgccacacaggcgtcgattgcaggatagacaccataaatatcaaactgagatgcatcaggaatagcttcttctaatttctctaattgagaatcaaaattcaccttcgcatcttttaccgttaaagtttcccaaactagatcgagaatacgacgatacagggttggatcagtaaatcctgtttcgcgacaaaatacctgataatttggatacattctctcacacaggcacgccataaacgttaagtgttgccaactttcaagcttttctaaacgtaaatggattgggttcttcaacattagtgattactcattttcttaacttagccgcagtttacctgaaaattgaaaatatccacatatttaccgccgatttagagcttattcttattcaattgctcaaataatcgcctatttgaggcaataccatcggcccaacgagtcggttcaggtaatcgatatccatttatacagcgttttacccacgctaatgcactctccatactcactttatagcctggagaaatatataaaggtttacatctttttttactacgataaatccaacctaactgctcatccttatccattaatttttccgtacttcctacatcgtcgtctaattttttatcatcaccacataaacgactttttgccacaccgatggttggaatatcggctaagagtccaaaatgacttgccacccctaaccgtctaggatgtgcgatcccttgaccatcaacaaaaacaagttgcggtttttgcttgatgccctgccaagcttttaataacgcaggacactcacggaatgaaaggagtccgggaatataaggtagtaatgttgcaatacgggctatttgatattcaacaatttcaaaggagggataatgcataacaacaatagcggcacgagtgaccgcaccgctattttcaaatccgacatcggcacctgcaatataagttggtgccataaattggtcggttaagataatctgttgagctttctctgtctgctcttgacgtaattgctgagtattaatcattatcctgatgataaggcttcgatagacggtgaaccgcatcaataaatgctccagcatgcgctggtggaacatcttgatgaataccgtgcccaagattaaagacatgaccagtacctttgccaaagccagctaaaatcgtagcgacttcttgttctattcttgctggtggcgcatacaacatagaaggatccatattaccttgtaaggcaaccttatcaccgactcgacggcgagcatcttcgatatcaatcgtccaatcaagtcctaatgcatcacaacctgtggctgccatcgcttctaaccaacgcccaccacctttagtaaataaggtgaccggaacttttctgccctcattctcacgaataagaccatcaacaatcttatgcatgtattgtaatgagaacaattgataatcgcgtcctgttagcacacctccccatgtatcgaagatcatgatggattgtgcccctgctttaatctgagcattcaaataaaggataacgctatccgccagtttatccagtaatagatgcagagcttgtggctcgctatacatcatttttttaatttttgtgaacgccttactacttccaccttcaatcatataagtagctagtgtccatggactacctgaaaaaccaattaatggcacattaccttgcaatgcatgacgaattgcacgtaccgcattcatgacataacctaattcatcttccggatcgggaataggtaatttttttatatcatcaaggctatttatcggtgttttaaaacgaggaccttcccctgtttcaaaatacagacctaatcccatcgcatcagggatagttaaaatatcagaaaataggatagcggcatctaaaggaaaacgtcttaaaggctgtaaggtaacttcgcatgccaattcggtatttttgcacaatgagatgaagtctcccgcctgtgctcgtgtttccttgtattcaggaaggtatctgcctgcctgacgcatcatccaaacaggggtgacatcaacaggttggcgcaacagcgcacgtaaatagcggtcgtttttcaactcactcatgtctaactccattaatagtaatagggccgcaaaatagcgtgtagtgtaacatgttggaaaaataacagttggcaggcaacacctttatttagctattttcttcatcttgtctaatattcgctatcgtatcttctattaaacgtcgcgcaatagtatcagaaggtggtatttgtggtaactcatcatagcgataccatgctgcactgattaattccgaaggatcatgtcgtaactctccccctgcataatcggcaagaaaacccatcataagagaatgagggaaaggccatggttgtgaagaaacataacgaatattgcgaatatgaatatgactttcttcaaaaacttcgcgagctaccgcatcttctaagctttcccctacttcaacaaaaccagctaaaacggtgtagagtggtgaatgtttatgcctaacatggtgtgctaatagaattttatctttattacgaataccaacaataatacaaggtgctatttgtgggtaataacgctcatgacagttatcacataaacatgcccattcactctcactatggcgcattttagccccacaatagccacaaaaccgatgagaacgataaaattcagcaagttgaacaccacgaccgactaatttaaataacttttcatcttgagatgcgataagccttggtgaacacatatcgctttccattttgtcataaatcagccagacattttctccttgccattccccaacaattttggcttgtttacccacaagtccccaatctgttgctaaaccaaatggaagttcacctttgggtaaccaaactcggccgcctaggctgactgtccaccagcctttttcaccacctgttagcgtatataaatgcatagtaataattctatcttagttaatgatatacaatagaggatactctctttcacaagagccgctcaatgaattatgtcgctacgccaaaattcatctatacctccatggtaaaaatataaattgtatttataaataaggttcactcgaatgacaaacataacgaaacataagatcgctatttttgatttagatgaaacactgttagccggagattctagctgtttatggacaaattacttgtgggagaaaaagagagtcactgatcctgcttttttagctttagataaacaaatgatcgctgactattacgcagaaaggctcaatataaataagtacttacaccaacatttatcttattttaatcagcataatattgaagaaataaatcaatgggttactgattttactcataccataatcaagccattgctctatcctcaaggcattaatactataaacctataccgacaacaaaatatccccgttatcattatctctgcaactatgtcttttctggtacatgcgattgcaaaacaacttaatgctgatatttctatgggcattgatatgcagataaaaaataatcattatacaggccatattgagggtattcctacctttagagagggtaaagtcactcgactcaatcagtggaaagaacaaaacaacattaaggattcttatatttatttctatactgactcagccaacgatctccctttatgctatcaagcaaatgaggttatcaccattaacgccgatgaaagattaagccaaatagcaacagaaaaagaatggcaacagtgctactggcagttaaataaataatcattatcgggcttgtagtttttaagatctttaatatactgtgggcattcttgtcggagtgcctagtgtttataaggctatttttaacacaggctgagaccgttaattcgggatccgcggaacctgatcgggctaatacccgcgaagggaacaagagtcattcgacctttagatagcttcattgtgtctattttttacactcttatctgtcgatactccctgcgacctccagacaagcatttttctcaatattcacccgacaagccttgtgcttgattgatatttattaggaaatgctatgtccaaaaatcaaactatctctattaaagatgtttcgcccactgcgaataaacagcgcccacgtaaagaacaacgcgatgcagcgcaatcctttattagcactattcaaggtattaattttcccaattcaaaacgtatttatatcactggtactcgttcagatattcaagtgccaatgcgtgagatccaacttgataagaccctgatcggtggctcaaaagaagatcctatttttgaagagaatgaacctattccagtctatgacacttcagggccttatggtgatccaacttctcaacttgacgttaatcttggcttaaaaaaaattcgccaaccatggattgatgcgcgtaatgataccgaacctctttcacacttaagttctgatttcactcaacaacgccttactgatgcaggattagaacatctacgctttccgttaaaacccagccctagaaaagcgctaaataataagagagtgacgcaattacattacgctcgcaaaggtattattacgccagaaatggaatttattgccattcgagaaaatatggggcgagaacgtattcgtagcgaagtattacgccaacaacatgccggatttagctttggtgcacatttacctgacaatattacgcctgagtttgtacgccaagaagttgctgctggtcgtgccattattcctgccaatatcaatcacccagaatctgagccgatgattattggccgtaatttcttagttaaggtgaatgctaatatcggcaactcttcggttacctcatctatcgaagaagaagtagaaaaactgatttggtcaacacgttggggggccgataccgtgatggatctgtcaactggacgttatatccacgaaacacgtgaatggatcatccgtaatagcccagtccctattggtactgttcctatttatcaagctctcgaaaaagttaacggtattgcagaagatctcacttgggaaatgttccgtgatactttattagaacaagcggaacaaggggtggattatttcactatccatgcaggtgtcctattacgctatgttcctatgaccgcaaaacgtttaacgggtattgtctctcgtggtggttcaattatggcgaagtggtgtttatcacaccataaagaaaatttcctctatacccacttccgagagatttgcgaaatctgcaccgcttatgatgtttcattatcattaggtgatggtctaagacctggctctatccaagatgctaacgatgaagcacagttcgctgaattacataccttgggtgaattaacaaagattgcttgggaatatgatgtacaagtcatgattgaaggcccaggtcatgtaccaatgcagatgatacgtcgcaatatgacggaagaactagagcattgtcatgaagcccccttctatacattaggccctctaacaactgatatagcaccgggctacgatcattttacttccggtattggcgctgcaatgattggctggtttggctgtgccatgctctgttatgtcactccgaaagagcatctcggactccccaataaagaagatgtgaaacaaggtcttattacttataaaatcgccgcccatgctgctgatcttgccaaaggacatcccggcgcgcaaattcgtgataacgccatgtctaaagcccgttttgagtttcgatgggaagatcaatttaatctagcacttgatcctgaaactgcccgtcaatatcacgatgaaaccttacctcaagcatcggggaaagtcgctcacttctgctctatgtgtggacctaaattctgctcaatgaagataacacaagaagtgcgtgattatgcagcaggtatggagcagatgtcgcaagcctttaaagcccatggtagtgagctataccacagtgcagaaatagccagttccgaggtagctgataatgaacagatcctctaattcggcttttgccccaaccgaaaaaaagttggggctttaccctgttgtcgattctattgaatgggttgagcgcctgttgaaaataggtgtaacaacgatccaattacgcatcaaagataaacagcccaaagatgttgaacaagatataatcactgcaatcaaattaggtcgtaagtataacgcaagattatttatcaatgattattggcaactcgccattaaacatcacgcttatggtgttcatcttggacaagaagatctcgacattgccgatcttgatgctattaaacagtcaggtttatgccttggtatttccacccataatgacactgaactacaaagagcaaaaaggttacttccctcttatattgctttagggcatatatttccaacgacgacgaaagatatgccatcaaagccacaaggtttaagagcactcaaacatcaagtagaacaaactcatgattttccaaccgttgctattggcgggatctctctagaaaaagtctctgatgtcgtagcaactggcgttggtggagttgctttagtgagtgcaataacaaaggcatcagactggcaacaggtaacacttaaattattagaattagtagagggaaaaccatcatgctaaatgataatgattttatgcgttatagccgacaagtgatgttagaagatataggattaaaagggcaaaccaaaatacagcaagccagagtattaattattggcttaggtgggttaggctctccagcatcactttatctagcaggtgcaggagtgggtgaacttattttagtcgatgatgataatttgcatgtctcgaatttacagcgtcaaattctctatcgcactcaagatatcccagatgcaaaatcagacatcgccaaacaggctctacttgccttaaatcctgacattaaaatcaccacctataaacaacgtgttaatgatgattttccctctacgttgcttcaaaacatcgatttagttttagattgcactgataacatgagcactcgccaagcaatcaatcgtatctgtgttaaacaacaaataccgcttattagtggcagtgccgttggatttagtggtcagttgatcgtgtttgagcccccttttattcatggttgttaccactgtctctatcctgataacaaagagccacaacgcaattgccaaacagctggaattctaggccccgttgtaggggtcattggtactctgcaggcacttgaagcaattaagttacttgcaggtttaccaagtacgttaagtggaaaactacgtctgttcgatggtagaaaacaaaattggagcaccttgcgcttaacaccatcaaaaaactgtcctgtttgtcgagggttagcatgaatattaccgtaaatgacgaacgttattctctggatatgcctgtcacgataagccagctccttattgagttaaaacaaccctctatgggggtggcactcgctatcaacgacatcattattccgcgtgaaaactggaatacacaaatgatcaatgagggtgacacaattcttctctttcaagcaattgcgggaggctgatatgttgaaaattgctgatactacattcacatcaaggttatttactggtacaggtaaatttgcgacaccaacactcatggctgaagccattaaagcctctggtagccaattagtcacaatggcaatgaagcgtgttgatttaaaaaatggcaatgatgatctaatcgcccctcttaaatcattagggataaaattattacctaatacttctggtgcaaaaacagcacaagaagccgtttttgctgcacgattagcaaaagaggcctttgatacccattggatcaaattagaaattcatcctgataccaaatacctacttcctgatccaatagaaacacttaaggcggctgaacttcttgttaaagaaggttttgtggttttaccttattgcagtgctgatccggtattatgccgtcgcttagaagaggtaggatgcgcagctgtaatgccgttaggttcacctattggttccaatcagggtttacaaactcgcgattttttgcggattattattgagcaaacctcaatacccgttgttgttgacgcaggtattggcgcaccaagccatgctcttgaagctttagaattgggtgcggatgctgtactcgttaataccgccatagccgtagctaaaaatccagttttaatggctcaagcttttaaagctgcaattgatgctggagagcttgctcgacaatctggactggctgtaccgacttcaataacacatatgcaagcacaagcctctagcccattaacccaatatttagaggctttctaatgaaaacattttctgattattggcaacaattagattgggatgacatcacgttaagactgaatagtaaaacttgtgaagatgttgaaactgctttatctcatcatactttaacgcttgatgattttatggcgctgatctcccctgctggccgacattatttagagccaatggcacaacgtgcccagcaactaactcgacaacgttttggtaatgttgtcggtttatatgttccactgtacctctctaatttatgtgctaatgattgcacttattgtggcttttcaatgagtaatgccatcaagcgcaaaacattaaatgaaaacgaaatccttgctgaatgtcatagcattcggcaattaggttttgatagcctgctactcgttacaggagagcatcaaagaaaagttggtatggattatttccgtcaatatataccgcttattcgccagcagttcagtttattaatgatggaagtacaacctctggcgacaaatgagtacgctgaattaaaaacgctcggtattgatggtgtaatggtttatcaagaaacctatcatgaacccacttatcagttgcatcatctaagaggaaaaaaacaagattttcattggcggttacaaacccctgatagattagggcaagccggcattgataaaattggtttaggtgcactaattggtttatctgacagatggcgtaccgattgttatatggtggctgagcatctgctatttttacaaaaacgttactggaaaagtcgttactctatctcctttcctcgtctacgcccatgtgctggtgggcttaatcctgcatcggtaatgagtgaagcagaattagttcagttgatttgtgcttttcgtattttagcccccgatgttgagctttccctttcaacacgtgaatcgccttactttcgcgataatacagtacctttagccatcaataatatcagcgctggctctaaaactcagcccggtggttattctgatagtcatgaggagttagagcaattttcacctaatgataatcgtcatgtcagtgatgtaattaatgctctcaaaacacgaggattacagcctgtatggaaagattgggataactatttaggtcgttaatagagataaaataataccgcgttttaatttatttttttaataaatataatcgcggttttattacataacacatagtaataaataattaaaaataatatcaatacgttagatataacaataaatttttcttaaaaagattaagttaactaactatttcattaggttaaaatcaatattttaagttcttgtatacttaaaccagttattcgttcaataaattctaactcaacgttttcttttaataagttttttgctaattgtatttgtactatctttttacctatttctataccttcatttttacctatttctataccttcatttttacctatctctatcccctccatttttcctaatttaaatcctttattttctaaccgccatgcaatattcataatcgtctctctatggttatctacttgttcagctatcttatttatgatggattcaaaatccgccgcatccataattgagaataaatattgtacaacagcgatagtgtcttcatcactgcagtttttctgatttatcgcttttgagagaagcatcgctaacttatcaagatcatcgcaactgttcacatgtttcattgcaatttccattacagcggcttttctatgtgttaataaaatttcatcatcaattgaattcaaatcaattaatgcaaaattattaagatagagttgatttgccaatgtagaaagcggaaaacaatctaaccaattgacagaaaaaggataaggtttgcgtttgccatgataaaacaagataggaacaaccaacggcaaagatgtgtaaccttgctgtagatgctgattcatagtgcaaaacgcatagtgcatcatacgccaagcgatcattttatctggtcgagattggtgctcaattaagaaataaattgagatattcccctttttggttttcactgagtagagaatatctgacatacgagaacgtaatttaatatcgataaaagaggaattttgtagctttaaagttgaaaaatcacaatagctttttaattcgtctgataaatggataaaaaagaaatccttagcattactaatattcatcatgaagcgtttgaatgcagcatcatgagaagaaattaaaagaggtttattcatcgctgactccgtgctaaatgtggaccgccagcttacagaaaaaaatgaccttttacttagtaaaaaatcatcataaatatctgaaaaatataaacttaattatttaacttacctatgcaagtataaaaaagagcaaaaaaataccctcgataactatcgagggtatttatatttaaaactaatgcagtatcaattagttatttgatgaaccgccgaaacccgcattcagcaattctgctaagttagcagaagcttcatctgcactgattgttgcttcagtttcatccgttggcagttgttgttgacgacgttggatacgatcctgatggtacgcaaaaccagtacctgcagggatcagacgacccacaataacgttttcttttaaaccacgtaattcgtcacgtttacctgcaacagcagcttcagtcagtacgcgtgttgtttcttggaacgatgccgcagagatgaaagactcagtagccagtgatgctttcgtaatacctaataggtcacgagagtatgttgctggtactttaccttcttcctctaaaatacggttcgaaactttaacacgagcgtattcaacttgttcaccttcaaggaattcagaactaccggcattttcgatagtcactttacgtagcatctgacgaacgataacttcgatgtgtttatcgttaatcttaaccccttgtaaacggtaaacttcctgtacttcattagtgatatagcgagtaaccgcatgaacaccacgtaagcgcagaatgtcatgtggtgattctggaccatcggagataacatcaccgcgttccacaacctcaccttcaaatacgttaagttgacgccatttagggatcatctcttcgtatgcatcgctgccatctaatggagaaataactaagcgacgtttacctttcgtttctttaccgaaagaaacaataccgctgatttcagcaaggattgcaggctctttcggacgacgagcttcaaacaagtcagcaacgcgtggtagaccaccggtaatatctttagtaccaccagattcttgaggaatacgtgctaacgtatcacccgcattaatagcaacaccatcatctaattgaacgatagctttacctggcaggaagtactgtgccggcatatctgtattcgggattaatacatcattaccttgtgcatcggtgatgcgcaatgctggacgtaaatctttaccgctaccagtacgctctgcagtatccagaacaaccagtgaagaaagaccggttaattcatccgtttgacgagtaatggtttgaccatcaaccatatcagcaaaacggataataccagaaacctcactcaccacaggcatggtatgtggatcccagttagcaactgtttcgccaccgttgacagcttcgccatcacctttcgataattgagcaccgtaaggtactttatagctttctttcgtacgaccgaattcgtcaatcagacgtaattctgtattacgagaagtaatcactaacttaccagcagtgttggtgataaatttcgcattgatcaatttcagagtacctttattacgtacctgaatgcttgattctgctgccgcacgggatgccgcaccaccgatgtggaacgtacgcatcgttaactgtgtaccaggctcaccgattgactgtgctgcgataacaccgatagcttcacctttgttgatgatatgaccacgagcaaggtcacgaccataacatttagcacatacaccaaagtctgtgtcacaggttacaactgaacgaactttaacgctgtctactgagttttcttctaacagatcacacagtttttcgtttaacagcgtattacgtggaacaaggatatctgcagtacctggtttcaggatatcttctgccgttacccgtcctaatacacgctcacgcagtggctctttaacatctccaccttcaatgaccggagtcatcattacaccttcggttgtaccacagtcgctttctgttacgacaaggtcttgtgcaacgtcaactaaacgacgagtcaagtaaccggagtttgctgttttcagtgcggtatccgccaaacctttacgagcaccgtgggttgagatgaagtactggagtacgttcagaccttcacggaagttcgcagtgattggggtttcgataatggagccatctggcttagccatcagaccacgcatacccgctaactgacggatctgagctgcagaaccacgagcaccggagtcagccatcataaagatgctgttgaaggaaacttgttgttcttcttcaccatcacggttgatcacagtttctgtagacagattttccatcatcgctttagcgacgcgttcattcgcagcagcccaaatatcgatgactttgttgtaacgttcacccgctgttaccagaccggattggaactgttcctgaatttctgcaacttctgcttctgcctcggcaatgatctctgcttttttcgcagggataaccatgtcatcgatacctactgaagcaccagaacgtgctgcgtaagcaaaaccggtatacatgatttggtcagcaaaaataactgttggctttaagcccattacgcggtagcaggtattcagcattttagaaatagcttttttacctaatggttggttaaccagtgcgtaaggtaggccttttggtacaatcatccataaaatagcacgaccaactgtagtgtcttttaagctagtttcagtggtgatattaccttcgccatctttgatctcttcagtgatacgtactttaacacgcgcgtgtaaagaggctaaacctgcgcgataaacgcgttcagcttcttttggaccacttaacaccatgccttcacctttggcattgatgcaatcacgagtcatgtagtaaagacctaataccacgtcctgtgaaggaacgataattgggtcaccacttgctggagacagaatattgttagttgacatcatcaacgcgcgagcttctaactgcgcttctaatgtcaatggaacgtgaaccgccatttggtcaccatcgaagtcggcgttatatgccgcacaaacgagtgggtgtaactgaatagctttaccttcaatcaggattggttcaaacgcctgtatacctaaacggtgaagtgtcggtgcacggtttagcataactgggtgttcacggataacttcatctaagatatcccaaactaccgcttcttcacgctcaaccatttttttagcggctttaattgttgtcgctaaaccacgggtttccagttttccgtaaataaatggtttgaataattcaagtgccatttttttcggcagaccacactgatgcagacgcaggtatggaccaacggtgattacagaacgaccagaatagtcaacacgtttacctaacaggttttgacggaaacgaccttgtttacctttgatcatatcagccaaagatttcagaggacgtttgttagagcctgtaattgcacgaccgcgacgaccgttatctaataacgcatcaacagactcttgtaacatacgtttttcgttacgtacgataatgtctggagctgctaaatctagcaggcgttttaaacggttattacggttgataacgcgacgatataaatcgttcaagtcagaagtcgcaaaacgaccaccatcaagtggaaccagtggacgtaagtctggtggtaacactggcagtacagttaagatcatccactcaggtttattgcctgattgcatgaatgcttcaagtaacttgatacgtttagtcagtttcttacgtttagtttcagagttagtctcatttaactcttcacgcagcgtttcacactcttgttccagatccatgctctgtaacaagttctgaacagcttcagcacccatcttcgcatcaaattcatcaccgaattcttctaatgcatcgaggtattgctcttctgttaagatttggccacgttcaaggctggtcataccaccttcaacaacaacataagattcaaaatacagtacacgttcaatatcgcgcagtggcatatccaacagcagaccgatacgggacggcagtgatttcaagaaccagatgtgcgccactggagaagctaattcgatgtgacccatacgttcacgacgaactttagtttgtgtgacttcaacgccacacttctcacagataacaccacggtgttttaaacgtttgtatttaccacacaaacattcgtaatcttttactggtccgaaaatacgggcacagaaaaggccgtcacgttctggtttgaacgtacggtagttaattgtttctggctttttaacttcaccaaatgaccatgaacggatcatatcaggtgatgccagagcaattttgatcgcatcaaactcttcggtcttggtttgcgctttcagaaactttaataagtctttcacgaaatggctcctgtcggagttagacctgccaggcaaatgacccctgtcattcacccctttaaaccagtgtagtcactgtttagcagactgccatatttagcagtctgctttcatggaatacgttattcgtcttccaattcgatgttgatacccagtgaacggatctctttcaacaatacgttgaacgactcaggcatacctggttccatctgatggttaccatcaacaatgtttttgtacattttggtacgaccgttaacgtcatccgacttaacagtaagcatttcttgtagcgtgtaagccgcaccgtatgcttccagtgcccatacttccatctccccgaaacgctgtccaccaaactgtgctttaccaccaagaggttgctgagtaactaagctgtacgaaccggtagaacgggcgtgcatcttgtcatcaactaagtggttcagtttcagcatgtacatgtaacctacagttactggacgttcgaattgttcacctgtacgaccatcgaaaagtgtaatctgaccagaagttggaagatctgctaatttcagcatctctttaatttccatctcttctgcaccatcgaacacaggtgttgcagttggcataccttttttcaggttttcagccaaacgtaacacttcttcatcactgaaggtgtccaaatcaactttctgacgaggtgccatacccagatcataagctttctggataaattcacgtaacttagccacttcttgttgctgtttcagcatcgcattgattttatcaccgatacctttagcagccatacccaagtgagtttcaaggatctgaccaatgttcatacgtgatggtacacccagtgggttcagtacgaggtcaacaggattaccgttttcatcgtatggcatgtcttcaattgggttaatcttagagataacacccttgttaccatgacgacccgccatcttatcaccaggttggatctgacgtttaacagccagataaaccttaacaatcttcaatacacccggtgctaaatcatcaccttgagtgatcttacgacgcttagcttccagtttcttcgcgaattcagctttcagttcatcatactgttcagctaattgttctaactggttttgcttctcttcatcagcaagacccagttctaaccaacgttcacgaggtagtttatctaatttgtcagcttcaataccgccggcaatcagaacgccacgaatacgtgcaaaaagacccgcttcaaagatacgtaactcttctgttaagtcttttttaacttcacgtaattgcgattcttcgatttctaatgcacgtttgtctttttctacgccatcacgggtgaagacttgtacatcaataactgtaccagatacaccgttaggaacacgcagagaagaatctttaacatcagatgctttttcaccgaagatagcacgtagcagtttctcttctggagtcagttgagtttcacctttcggtgttactttacctaccagaatatcaccgcctttcacttcagcaccgatataaacgatacctgattcatccagtttagataacgcagcttcaccaacattaggaatatctgcagtgatctcttcaggccctaacttagtatcacgagacacacaagcaagttcttgaatatggatagttgtgaaacggtcttcttgaacaacacgctcagatacaaggatggagtcctcgtagttataaccattccatggcataaatgccacgcgcatgttttgacctaatgcaagttcaccaaggtctgttgatggaccatcggcaagtacatcaccacgttcaacaggttcacctaaagaaacacaaggtgtttggttaatacatgtgttttggttagagcgggtatatttagttaagctgtaaatatcaatgcctgcttcaccagcataagtctcatcttcgtttactttgataacgatacgagaagcatcaacatactgaacagtaccaccacgttttgctaccgcagtaacaccggagtcaaccgctacagcacgttccatacctgtacctaccagtggtttatcaccacgaagtgtaggaacagcctgacgttgcatgttcgcacccatcaatgcacggttggcgtcatcgtgttcaaggaatgggatcagtgaagcaccgacagaaacaacctgttgagttgaaacgtccatgtactgaacttgatcacgactaaataaacttgactcacctttatgacggcaagttactaattcttctacgaagtggccatcatcatctaatacggagttagcctgagcaatgatgaagttaccttcttcaattgcagacagatagtggatttcatctgttacagcgttgttttctacaacacggtaaggcgtttctaagaatccgtactcgttagtctgtgcataaacagataatgagttaatcagaccgatatttggaccttcaggtgtttcgattgggcacacacgaccatagtgagttgggtgtacgtctcgaacttcgaagcctgcacgttcacgagtcagaccaccagggcctaatgcagaaatacgacgtttatgggtaatttctgacagcgggttattctgatccataaactgcgataactggctagagccaaagaactctttaactgcagcagaaatcggttttgcattgatcatatcttgtggcattaatgcatcaagatcacctaaagatagacgctctttaactgcacgctcaacacgcaccagaccaacacggaattggttttcagccatttcgccaacagaacgaatacgacggttacctaagtggtcgatatcatccacttcacctttaccattacggatatcaatcagttttttcatcacttcaatgatatcttcttggcttaagatgccagaaccttcaacttcttcgcgacctaaagagcggttgaacttcatgcgaccaaccgcagagagatcataacgatcttctgagaagaataagttctcaaataagttttctgccgcttcgcgagttggtggttcaccaggacgcatcatgcgatagatttcaactaatgcgcttaaacgatcgttggtaggatcgacgcgaatagtttctgaaatataagcaccatgatctaaatcgttggtaaacagtgtttcgatggttttatgaccagcttgacttaagcgagctaacacatctaaagagatttccatgttagcagcacaaatcaattcacctgtcgcttcatcaatatagtcacgagccactactttacctgcgatgtattcaacaggtacttcgatgcgctcaatttgttctttttctaactgacgaatatgacgagcagtaatacggcgacctttttcgacataaactttgccgtttgcttcaatatcaaatgaagctgtttcaccacgcagacgctcaggaactaacgtcatcatcagtttattattactgatttcaaacgttgttttctcgaagaacagatttaagatgtcttcggtgctgtagttcattgcgcgtaaaatgatagtcgctggtaatttacgacgacggtcaatacggacaaaaagattatctttagggtcgaattcgaagtctaaccatgaaccacgataaggaataatacgtgcgttatacagtactttacctgaagagtgcgttttacctttatcgctatcaaagaacacaccagggctacgatgtaactgggacacaataacacgctcagtaccattgataacaaaagtaccattatcggtcattaatgggatttcacccatatagacttcttgttctttgatgtctttaacggtgccttctggggcttcacgttcataaatgaccagacgcagttttacacgtaatggtgcagaataagttacaccacggatctgacattctttaacatcaaaaacaggctcgccaaggcggtagctgacatattgcagttcagcattgccgctgtagctttggattggaaatacggaacggaaagccgcttccagcccattttgaccatcaggatcttgctcgataaacttctggaacgagtcaagttggatagaaaggagatagggaacatccagaacttgtggacgtttaccaaaatccttacgaatacgttttttctcggtataggagtaaaccatagggttcctcagctcgctgaaaagtgacccactctgcctgcccttgttattaagggtgacacgacattcatctaacactgtttttttgtaggtaggaaaatagaattttccataatacttattgctattactcttaaatcatttcattgcattgcgcacactaccgagcttttggaaaaacgtggatcgtagtggctaacacagtatattaagtcgtcaatagcaaaaaatattgaggtaaagaggaagccaaaaaagtgtgaaaaagctactcttaccttacagcgcaaaaaggctggtgaccaaaaaatcaccagccatcagccgttaggctgctctctgggaagttaaattacttaacttcaacctcagcacctgcttcttccagagctttcttcagagcttcagcatcatctttgcttacgccttctttcagagctgctggagcagattctactaagtctttagcttctttcagaccaagaccggtagcgccacgtactgctttgattactgctactttgttaccgccgatacctttcaggataacgtcgaattcagttttttcttcagcagcttctgctggacccgcagcaacagcaacagctgcagcagcagatacaccgaatttttcttccatcatagtgatcagttcaacaacgtccattacagacatttcagcaactgcatttaagatatcgtctttagagatagacataacaattgttcctaaaattcagaaaaagtttatacgtagtaaagcaacgaaggaaattggctattaagcagcttctttctgatcgcgcagtgcagccagagtacgaaccagtttgccggcagcggcttctttcatggttgacatcaggcgtgcgattgcttcttcgtaagttggtagtgtagccaggcgatcaatgtttgaacctgggataaactcaccttcaaaggcagccgctttaatctcgaatgctgggttcgctttcgcgaaatctttgaacagacgagctgcagcgcccgggtgttcagaagagaaagcaatcaaggtaggaccaacaaatgcgtctttcagcacttcataagaagtaccttcaacagcgcgacgtagcaatgtgttacgtactacacgtacagtaacaccagcttcacgacatgctttacgcagttcagtcattttatctacagttacaccacgggaatccgcaacaactgcagacagcgcgcctttggcaacttcgctgacttcagcaacaatcgcttgtttgtcttgaagatttagtgccattagcttcttgctcctggattaaccgagtaaaaactcgggactcacatcacttattgccacaatggaaataagcgctaaaacacggtgagcagaatccagaatataaaattctttttggctctctcaccgtctacgcaggaaaattaagtaattacttacacctgcggtcttggacggggtctggataggccagactccaaccgaatttgggaatttagttatgttgactcacattcaaaatacaacatagctaaactcaaggcgtcaaattctatacaaatttgacgccaaggtaaagtcttttatgacttttagtctaatcgaggattaaactgtcgcgcttaagcttgcttgatcaatagcaacacctgcacccatagtggtagacaggcttactttcttgatataaacgcctttagctgaagatggttttgcttttttcagcgcaaccagcagagcttctaagttttctttcaactgagcttcgttgaaatcaactttaccgatagtggtatggataataccatttttgtcgttacggtaacgaacctgaccagctttagcatttttaacagcttcagcaacgttaggtgttacagtacccactttcgggtttggcattaaaccgcgtggaccaaggatttggcctaattgaccaacaacgcgcattgcatctggagatgcaattacaacgtcaaagtccatttcgccagctttaactttagcagctaagtcatccataccgactaattctgcaccagcttctttagcagcttctgcatttgcaccttgtgcgaatacagcaacgcgaactgaacgaccagtaccgtgtggcagaacagtagcaccacgaacgttttggtctgatttacgagcatcgatgccgaggttaacagcaacatcaacactttcaacaaatttagctgtagctaactctttcaataaagcaactgcttcattgatttcgtactgtttcactacatctactttttcacggatattgcgcatgcgcttggttagtttagccatcagattagtcctccactaccaggcccatggaacgagcagtaccttcaattgaacgcatcatagcttcaacatcagcaccagtcagatccgcagctttagtttctgcaatttcacgaacttgagcagtagttactttacctactttctctttgttcggtttgccagaacctgatttcacgcccgccgctttcttcagcagaatcgctgctggaggagttttagtcacgaaagtgaaagaacggtctgcgtaaactgtaataacaacagggattggtaaacctttttctacgctttcagttttagcgttgaatgctttacagaattccatgatgttaacaccttgttgacccagagctggaccaactggtggacttggattagccatacctgctgcaacttgcagtttgatataggcttggactttcttagccattaattaattcctcaatgtgggtatatcgcccggctagggctccccgatttactttgttttgtctcatgacaaaacaactcaaaacgaaaggtggaaaattgtagtgaacttttccaccttttgcaagaaaggcgagtaaaaaggtttaacctttttcaacctgactaaagtctaattccactggggtcgcacgaccaaagatagaaacagacactttcaggcgacttttctcgtaatcaacttcttcaacaacaccgttaaagtcagcaaatggaccatcactaacacgaaccatttcacctggttcaaacagtgttttaggacgtggtttgtcaccaacttgttgtagacgattcatgatcgcatcaacttctttatcactaattggtgcaggtctgtctgaagtaccgccaataaaacccatgactcttggcacattacgcacaagatgccaagttgcatcattcatgaccatttggacaagaacatagcctgggaaaaatttacgctcacttttacggcgctgtccgctacggatctcaacaacttcttctgttggaaccataacttcgccaaatgagtcttccatttcgtttaatttgatatgttcacgcagagactgtgctacacggccttcgaagcctgaaaaggcttgaataacataccagcgttttttaggagaatcagtcatgaacacctcacaggccagtaataaatgaaactaaacgaaccagaatgccatccagtccccaaagaaccaatgacacaatagccgtcaccgcagcaacgattaatgttgtctgcaatgtttcttgacgcgttggccatactaccttacgcatttcaattcgagcttcgcgagcaaatgctagtgttgctttaccttgtgttgtccacaacgcaactccgcccgcagccgcgaacagaataacaaccgctaaagcccgcaacgcaaggttaaattcacgataaagatagttgccacccactgctactaccagcaataagacggtaatgatccacttagcgatatcaccaccgcgtttgctatcttgagctccgctattcgcactcataaattaacctgtccatatgatgtaaataaatagccagcttgcctcgcaagagcaaaacaaatcagactaaccataaataaactatgattgcatctgacacagcgtcatatctctatgacattcgtatctgcaagatactggactcaattcgttgtatcagagcctatctcaccaataatttccagaaaactagtgatgagataggttctttttcaaacaacgcataaaaagggcatcaattgatgcccttctttaggaaaattaccgagtaattaacctaatactttagcaacaacacccgcacctactgtacggccaccttcacggattgcgaagcgtaaaccttcgtccattgcgattgggtggatcagttcaacgatcatgttcacgttgtcgcctggcattaccatttctacgccttctggtaattcgatagtaccagttacgtcagttgtacggaagtagaactgtggacggtagcctttgaagaatggagtgtgacgaccaccttcatctttgctcagaatataaacttctgattcaaatttgttgtgtgggttgattgaacctggtttcgccagtacttgtccacgttcgatttcttcacgttttgtaccacgcagcagaacacctacgttctcacctgcacgaccttcgtcaagtaatttacggaacatttcaacgccagtacaagttgttttggtggtttctttgataccaacaatctcaacttcatcacctactttgatgataccacgctctacacgaccagtaactactgtaccacggcctgagattgagaatacatcttcgattggtaacaggaatggtttgtcaattgcacgctctggctctgggatataagaatccagtgcttctgctaattcaacaatttttgcttcccactctgcttcgccttccagtgctttcagcgctgaaccacggattactggagtgtcatcacctgggaaatcgtattgagacagaagttcacgaacttccatttcaactaattctaacagctcttcatcatctaccatgtcacatttgttcaggaatacgatgatgtaaggaacaccaacctgacgacctaacaggatgtgctcacgagtttgtggcattggaccatcagttgctgctactaccagaatagctccgtccatttgcgcagcaccagtgatcatgtttttaacatagtcggcgtgacctgggcagtctacgtgtgcgtagtggcgagttggagtatcgtattctacgtgtgaagtagagatggtgataccacgcgctttttcttctggcgcattatcgatttggtcgaatgcacgagcagcaccaccgtaagttttagctaaaactgtagtgattgcagcagtcagagttgttttaccgtggtcaacgtggccgatagtaccaacgttaacgtgcggttttgaacgttcaaatttttctttagacacgactatattccttaatatcgctccctctcacagagggagcgtaaactaaattgaactcgaaaggatcttatttcgctttacgagcttcgataatagcctgagcgacgttgctaggcgcttcgttgtacttcaagaactccattgagtatgaagcacgaccctgagtttgtgaacgcaggtcagttgcataaccgaacatttcagccagtggtacttgtgcacgaatgatcttaccagtaggtagatcgtccataccttcaaccataccacgacgacggtttaagtcaccgataacgtcgcccatgtaatcttctggcgtttcaatctcaactttcatgattggctctaacagaatcggttttgctttcatgaaaccttctttaaaggccatagatgcagcaattttaaacgcgatctctgaggagtcaacatcatggtaagaaccgaagtgcagacgagctttgatatcaacaacagggtaaccggctaaaggacctgatttcagctgttcttggatacctttgtcaacagctgggatgaattctttaggaattacaccaccaacgatatcgttgacaaacacatagttctcttcaccacctgatggtaatgggctaaggtcaataacaacatgaccatactgaccacgaccaccagattgtttagcgtgtttaccttcaacgtcagtaatttcttcgcgaattgtttcacggtaagcaacttgtggtttacctacgttcgcttcaactttaaactcacgacgcatacggtcaactaacacgtctaagtgtagctcacccatacctgcgatgatagtctgtccagactcttcatcactagatacacggaaagatggatcttcttgagccagacggttcagagcgatacccattttttcttggtcagctttagtcttaggttcgatagcaacagagattactggctctgggaattccatacgttctaagatgattggtgcatcaattgcacacagtgtatcacctgtagtaacgtctttcagaccgatagcagcagcgatgtcacctgcacgaacttctttaatttcttcacgtttgttagcatgcatctgaacgatacggccaaaacgttcttttttgtctttaactgggttcagaactgtgtcaccagagtttacaacaccggaataaacacggaagaacgttaagttaccaacaaatgggtcagttgcgattttaaatgccagtgcagagaatggctcttcatcgcttgaatgacgttctgctggagtatctttaccatctggtaaaatacctttaattgcaggtacatctgttggtgctggcagatattcaataactgcatccagcatcgcctgaacacctttgttcttaaatgcagaaccacaggtaaccaggataatttcgttatctagaacgcgtttacgcagcgcagatttaatttctgcttctgacagttcttcaccgcccagatatttgtccatcagatcttctgatgcttcagctgcagattcgatcaggttgttgtgccactcttctgctagatcttgtaaatcagcaggaatgtcttcgtattcgaaggtgacgccttgatcttcttcattccagcgaatcgctttcattttgatcaggtcaacaacaccagtgaaatcttcttcagcgcctactgggatttgcagtggaactgggtttgcagctaaacgtgttttgatttgttcaactacacgtaagaagtttgcacccatacggtccattttgttaacgaacgcgatacgtggtacatgatatttgttagcctggcgccatactgtttctgactgaggctgaacaccaccaactgcacagtaaaccataaccgcgccatcaagaacacgcatagaacgttctacttcgatagtgaagtcaacgtgtcccggggtgtcgatgatgtttacacggtgaggctcaaactgtttagccataccagaccagaatgcagtagttgcagcggatgtgatagtgataccacgttcctgctcttgctccatccagtccattgttgctgaaccttcgtgagtttcaccaattttatggtttacaccggtataaaacagaatacgttcacttgtagtggttttaccggcgtcgatgtgcgcactaataccgatattacgatagcgtgctatgggggtttgacgagccattttttcctctctcgtgggcgttcaattcaggtaaaggacagcatagctgtcctgaaaagagttgcgactacttcgcggattaccagcggtagtgtgcgaacgccttgtttgcatctgccatacggtgaacgtcttcacgtttcttaacagcagcgcctttgttttcagccgcatcagataattcatttgccaggcgaagagccatggatttatcaccgcgtttacgagcagcttcaacaatccaacgcattgctaatgcattacgacgaactgggcgtacttcaactggaacttggtaagttgaaccaccaacacggcgggatttaacttccacagtaggacgtacgttatctaatgcgatttcgaacgcttccagttcagttttgcctgaacgctgagccagggtctctagcgcattataaacaatagattctgcagtagattttttaccgtctaccatcagaatgttaacaaatttggccagtagttctgatccgaacttaggatctggcagaattttacgttgaccaattacacgacgacgtggcatggaaatactccgtttaaaattcagggttgtccaaaactcgatgagtttattttgacattaattgtgaaaaaatgtttggccttacttaacggagaaccattaagcctttggcttcttcacaccgtacttagagcgaccttgtttacggtctttaacaccggaacagtccagcgcgccgcgaacagtgtggtaacgcacacctggtaagtctttaacacgaccaccacggataaggattacggagtgctcctgcaagttgtggccttcaccaccgatgtaggaagaaacttcgaaaccgttagtcaaacgaacacggcatactttacgcagtgctgagtttggttttttaggagtggtagtatatacacgagtacatacgccacgtttttgcgggcaagcttccagagctggaacgttgcttttaacaactttcgagctacgagatttgcgcaccagctgattaatagttgccatttaaaaaaagctcctggtttttgcttcgtaaacacggatttgaactctgtcttgtcgacaagacaaaacatgaggacgcagaattttattgctgacgagctcatgtgtcaagaattatacagcaattctacgcgccccagtgaatttgttgggggtgttttaccgttaaatcgacaaaatcaccataattgataagtttaatctgatgagaaacctgatcttttaggcctcgcgcgagaacatcatcaattaatgcataaacagaaatttgctgagccagacaataaattaataaaggattatcttcaagaacggctagtacaccatcttggattaataaaacttcatcatgctttgtcaataaagacaaaaatgcgtccaaatcactttggtaaatagagacggagtaagtatacaacataaccgttcatccttcttgactaactcatcattaaaaacgtaataccacgtcatagtgactcagtttctgagcaatctcttgagctgttataaccttggcgtcaagaataaacattgtttgtgacgataaaccacgatgagctagatcttcttgtgatatatagacgtttgtcacatcatacaaggggaggactttaaatgtagctgcatgatgacgagaaagaacgccttcaggctgttgattttccagtaattggaacacgccatcagaaagaaaaaaaacacctatattttcggttaaggcggaagttgctaatagcgcatctaaaccttcacgcccagcactattaccatgaggtgcctgagtaaagataaacgccacagaattcattttcttcattaaaactgcaccacacgatcacaagttaacatcgcttgagcgagggctcctaagccacttagctcaaactttgttgccatattgctgctcagtaacccctgctctttagcttgttgctcatcaacaacaccacgccgtaatgctgcagcaacacaaacctgcaaagggatattgtagcgtgaagccaatgctatccaggcttttggcaagtcaaattcatcacttgcgggtgagaccaattgattagcattggacacaccttcacgataaaaaaatacttgtgcgatgtgatgacctttttcaagtaacgctttagcaaataaataagcgctagaagcttgttccgtgccataatgtggcccagtcaccagcaagcaatatgtcagattcatcgtattactctattctccatttttaaattggcggatatagagatacacagtatgtttagaaatattcagtctatcagcaacctgatttatcgcgtctttgatatcaaagatccctttctcataaagatttaacaccacttgtttatttttcgcattattagccacttcacgatcgttattcacttcttcaatcgtaaattcaagtgtttgtgccacgagatcatcgacagaagaagcaaaattcacatcagaagccacttcatgagtttcttcaggaataaaggttttaataatctcagagaatgggacatcaaggttcatattaatacataataaaccaataacacggcgctcacgattacgaatagcgatcgtaattgatttcatcaaagcgccactttttgcacgggtaaaataagcttttgaaaaacttgaatcttcatctgtaatatcatgcaacatttgtaatgctaaatcggtaataggtgaaccaatcttacggcctgtatgttccccattcgcaattttaaccgctgaacatttcaaatcttccagagagtgcaatacgatttcgcagtgatgaccaattaacatggctaaaccatctactgcagcctcatatgactttaaaatttcgtgatcagtttgagtaaaaggtcggctatctagtttttcaaactcgttgctgtcaccatagaataacgggctagacatttgattatataatccttaaaggctttaattatgataatgacttgaggtcttattatttataatgattcatcttcatgaatcaattcaatattaaaatttaaatataaagtcctgtacaatcttgacgttaaatcgtcaagggatctacgtcaagagtcttagaataagagctttgtcataggtcacagctttgctttattttctttctatttttacattactcacgcatttctcttgataaaattaccctatttcggggatcaagaaaaagatcaatgaagctaagcacaccagttatatttaaatattatgctattttaagaagttgttaaccctattaatatgctaattatctaaaaattttaacaaatattataaaatatcgatccgcgggtgaaaccgactatatctacattttctctcgcttgttttatgcaaaagttgctaggaaaacagtttacctttagcactgttatgcacttctataatttatctggctagaatatattcattactatatgtatgcagagagattattactattgattctcctatcagaatgacataaccgttatctcgacattactgctgtttctacacacttttacaggtttacttatgtttttaggtcaatattgggcaaagtttgccccaactacgctttttgttctactttggagtagtggtgctattttttctcgttggggtttagataatggcagttcatttgccattttgacttggcgttttgttattgcattactgtttcttaccctactttgtctccaacgtcgccaatttcttccccctaaaggaagccgtttaaaaacagcatgggttggattgctcattatcggtggttactctatttgttacttgttagcgctcgctaacagtattacaccagggatgctcgccactattatgggtattcagccgatcctcactttatggatcattgaacgacactttactgcgagtcggttattaggactatttattgctttgataggattagtattagtggttgcgcagagtttatttaatacttcactctcattaacaggaatgatttatgcactcattgcactcctctgtatgagctttggcgcaatttcccaaaagaaattacaattagcgcctatggaggcattgccgatacaatatgtggttagtttaacgctatgcttattatttattccatttcaacctatgcagcaatcttgggatattggttttattgttcccgtactttggctagcaattattatttctgtcgtggcacaattactactctaccgactgttaactgcaggtaatctggttaatgtgactagcttattctatttagtaccgggagtaactgcgttaatggattatatcttcttaggcaataaaatgtcttggcttagcttagcggggatgggcgccattattattggtcttatttttgtatttaaaaagtctaactcgatgattgttgaagaaaaaataaaataaacaaacaaaaatgctggaatagtactccagcattttttcattaagcaactgattatttgtcgctttcaacactcagcaattcaacttcaaagactaatgttgagttagctggaatgccactcgttgcacgttgaccgtaacctaattcaggtggaataactaacttaatttttccgccttctttaatgtatttcataccttcagtccaacctgggataacacttttcaggctaatagttaaaggctctttacgatcataagaactatcaaattgtttaccgtcaatcagcatacctttatagttcacagtaacgcgatcggcatctgttggtgttttacctttacctggattttcaactaaatacagtaggcctgatttagttttaacaacacctttttcagccgcaaattctgtacggaatttatcaccagcagctttattctctgcagcttctttttccattttcgccgttgcaaccgtacgtacttgatcttcaaaagctgccagcgttaattcaatttctgcatctgataatttagatttattattaaaggcatcttgaacaccggctaataattgttttgaatctaaattaataccgatatttttttgttctgttaatgcagcttccatatagcgacccattgacgcgcctaaagcatatgcattctgctcatcctgagttttaaacgcgctatttaatgttggtactttagctgtctcttctgccagtgcatgaggtgcactaaatgcaaatgctaaacttgttgccaacaacgtcgtttttaataaagatttcatcccgttctccagtttatgttagtgagtcactacgcgttgcaaacgatcatcttaaatcttagcaaatacgttttgcatcacttctttctgtcgttgcggagtagatctcatccgcgggtaacaattttatatgaattaaaaatatttgccgacacccacaaccgttaatgttaggattttcgtcagcacagcgtgttaccacattaacaaaatagtcttttaactcaaaccagatttatgtcttactgtgtatatatcagtaaataatattaaattttactcagtaattcactatattagtcattatatgacatcacataacaaggagaaaaaaccatggacattaaggaaatagaagagttacttattcaattagagagtaaaattgctttccaagatgccaccatcgaagagttaaatcaggtggtcacacaacaacaaattgaaattagtcgttttaaagaggccttaaaaatcgtcaccgaacgattgaagtcatcccaatcatcaatgctcgctcgccctgaagatgagaccccaccacctcattattaacttcaagtgagactgtaggcaagaacaaaaaaggagcgttatcacgctcctttttcaatggtttcacaagattaatgttggcaaccacaaccgccatgaccgtggccgtgaccaccttttccatgaccgccaccacaacatccaccttcttcaccgtgatcgtgatcatgaccatgaccatgaccaccaccacagcatccgccttcttcaccgtggccatgtccgccacaacactcatgaccttcatcttcaccatgaacatgaccatgagctaattcttcttccgtggcttcacggatagcaacgatttctacatgaaacttcaggttttgacccgctaacatgtggttaccatcaacgataacttcgtcaccctcaataccggtaatttctactggtactgggccttgatctgtatcagctaagaagcgcatacccacttctaactcatcaacaccaacaaaaacatctttcggtacacgttgaactaagttttcatcgtattggccatatgcgtcatcagaagcgacttcaacgtcgaacttctcaccaacttcacgacccgttaatgcattttctaaaccactgattaaagaaccacggccatgtagatagtctagcggtgcactcaccggggactcatcaactaaaacaccgtcttctgttcttacttgataagccagactaactaccaagtcgtttgctactttcatgacatctcctacatacccgtgggcaaaattttcccgattgtaacgaaaaataaatcgtctgtatcgggttatatcaaaaaaacctacaattattgtggtgtaaagatcccgatgacctgttcattttcacgcacaagtgcactcacctcaccgtctgtttgcctttgctgatgaccacattgagcgcattccacaatatccactttatcttctcgccacattttgagtgtatcttgggcttgacagtggggacatactgcgccagcaataaaacgcttacgggttgcagacatggggtcagttctcctgtttatcaatgggtcttttttctctatttacttgagggatagcatcagttaacgattcgtcccaaatatcaggctggtggtgctcttgtctcatctcttcattaaacagctcttctaattcacgacgagcctctttaacacgtgaaacattcgagacttcttcgggtgattcgtccaccaactttcttaataactgcatatctagacgacgaaaatgctgttgtgcacgataggcctgatgtggatgcataccaagttcaattaaagttttacgtcctagctctaaagcactcgagaaggtttctcgactaaactctgttacccctgcttttaacagctcatgtgcttcaacccgtcctcttgctctggcaataatttgtaattgaggaaaatggcgctggcataaatggacaatttccattgtcgcttcaggctcattactggtgatcacaatggctttcgcgtgttcagcccccgcagcacgtaataaattcaagtctgtcgcatcgccataataaactttataaccatatttacgcatggtacttaaactaccaacgtcatgctctaatacggtcacattgactttatttgccataagtaggcgcccgactacctgtcccatacgaccaaagcccaccaggatcacttctggatggttattttcaacaaaaggctcttcgtctatctttgcatcattataacggcgcgataacacggcgtctgtcatttgcatcacaagtggcgtagtcatcattgaaagcgttacgacaaccaaaagcaatgccatctgttcactatttaatacccccatcgccatagaggtagaaaaaacaacaaaagcaaattcaccgccttggcttaatacggctgaaaattgcaaacgtgtcgaaaagcgtaatctcgctaaccaagcgataccataaagtaccaaccctttaatcaagactaaaatgacaacgcccagtaacacttgcggtaaataatgccacaatatacctatatcgagggacatgccgacggagataaaaaacaaccctaacaataagcctttaaaaggttcaatcgagatttctaattcatgacgatattcagagtcagctaataatacccctgcaataaaagttcccatcgccatggaaaagccaatcatttccataaagagtgctgaccctaataccactaatagcgcaccggcggtaaaaacttctctcacacccgatttaacaattaagcgaaatagtgggcgcaataaatagcggccacaaattaataatgcagcgaatgagactatttttagggcaatacgataccaatcactactggctgtttcgccagcaagtaaagggatcaccgcaagaataggaataacggccatatcttgaaagagtaaaaccgcaaaacccaactgccctccttcgttatgattcattcctttttcattcatcaattgtaaagccatcgcagttgatgacatggcgatacctaggccaccaatcaatgctgcttgccacgaaaaagaagttaagagtaaaagtagccctgtgataacagatgcagtaaagacaacctgcatggcgccgacaccaaatattgctcgccgtaactcccaaagcttagctggatttaactccagcccaatcaggaacattaaaaaaacaacccctaattcagaaaagtgtaagatgtaatcaacatctttaaataaccctaatccccaagggccaatcgcaataccagcaattaaatagcctaataccgcaccaatttttaagcgttgtgcaatggggaccataatcacggcagcacataagaaaaacagcacggcttttatcatccaattaccttccatccgcgtgttccccctctaacggtgcttgtaaccattggcgataagcatcactaatatgccctagtgttgttttggactgttgccttgcggagtaaataatcatcggcgataaccagcgcataccacacatttccgccattaactcgataggacgcaataattcagatagtgtgtagtgatttttaccattatgttgataagcatgttcaggctcaccagtagtcaccacacaacggaatgtttttcctttaagttgagctcgtccaactttattagcaaaaggacgcgtgagcactctatcttgccactcttttaatagcgcaggacaactataagtttgtaatggaaactgaaatacaatgacttgatgttgacacaatagtgcttgctcacggtgaatatcgataaaaaaatcagggtaagtggcatataaatcatgaattgttatattttccagatccctcaccgcacgcaacaacgctttattggcgatagattgacgcggctcgggatggacatacaccagtaaaacatttgatgcgtttgacatcattcctccttacaaaacgtgtcagaaacctttttttccgttaccatgcacgcattgtgaccaactgttacgaacaacttactctatatattaatttacatactcttaatagacgacatttatgattgttttttcttctttgcaaattcgccgcggtgtcagggtattacttgataatgccagcgcaacgattaatccaggacaaaagattggtcttgtgggtaaaaatggctgtggcaaaaccacactgctctctttattaaaaggggatctacaagctgaagcgggtaatgtgacatttcctagcacttggtcaatggcatgggtaaatcaagagacacccgctttagacgttcctgccattgattatgttattgatggtgatagagaataccgcgaattggagcgtcgtctacaacaggcgaacgacaataacgatggtcatgctattgccctgatccacggccaactcgatgctattaatgcgtggactatccaatcacgtgcagccacattacttaatggcttgggattcagccaacaacaactcactgagccagtaaaatcattttctggtggttggcgaatgcgcttaaacttagcacaggcactaatttgtcgttctgatctattactacttgatgaaccgactaaccacttagatttagatgcggtaatttggctagaaaaatggctaaaaagttataatggtacgttgattttaatttcccacgaccgagattttcttgatccgattgtggataaaatcttacatattgaacaagagaaaatatttgaatattcaggtaactactcttcgtttgaaatgcaacgtgcaacaaaattggcacaacaacaagcactctttgaaaatcagcaagcaaaaattgcccatttacaaagttttattgaccgctttaaggcgaaagcaactaaagccaaacaggcacaaagccgtgtcaaaatgcttgaacgtatggagcgagtggcgcctgcgcactcagataacccgttccagtttagttttcgccaaccagaaagcttaccaaatccgcttctgtctatggaaaaagtcagtgccggttacggtgataagattatccttaataacatcaaacttaacttaattcccggctcacgaattgggctcttaggccgtaatggtgcaggtaaatctacattaattaagctgttagctggagaattagctccactacaaggaaaggttgccctttccaaagggatcaaattaggttatttcgcccagcatcagctggaatatttacgtgccgatgaatctgcattacaacatttaactcgtttagcgccacaagagactgagcaaaaattacgtgattatctaggagggtttggtttccatggtgataaagtcaccgatgcatgtggccaattttctggtggtgaaaaagcacgtttagttttatcgctactggtttggcaacgcccaaatttactactaatggatgaaccaaccaaccaccttgatttagatatgcgacaagcattaacacaagcgctaattagctttgaaggtgcgattgttgtggtatcccatgacaggcatttattacgctcaaccacagacgatttatatctcgtccatgacggtcaagtagagccatttgaaggcgatcttgatgattatcagcagtggttagttgatcaaaatcgccaagagactcaagctaataaaacgcaacccgatcaagaaacaacaaacgtctctaacttaacggctcaagataaaaaagagcaaaagcgtaaagaggcggagtttagacaacaaactcaacctttgcgcaaaaagctaaccacattagaaagtaaaatggataagcttagccaagagctgaccgccatcgaaactgagctttctgatagtcaaatttatgaagcgaagaacaaggcgacgcttaccgattgcttaagccgtcaaagtattgccaaatcggctttagaagaagttgagatggcgtggatggaattacaagaaaaactagaagagatgaccaacgcttttgagtctcaataactatttttcattaatgcctaaaaaggaactattaaaataatatagttccttttcattaaaatacatttaaaaaatttatataactcatttaacttaacgcctttatttcctgtcacattagcacgttttacacaaaattatatcctcaccttgtacgcaattatccaatttaaatagttatctatcatttatttacccattatttgtattaagtaagggaaatactcattttctagctaaagtttttaatctaccagccgaattaatcattctgctaagtggagctcccactggcgaagaaaaaggccaagctaataggtagggttatgttaaaacgaattaaaatctctcaaggtttaatgtgtgtcctgactctgttttgtattattcaggtaatatctggagtacaaagcattcacgatgcctaccaaactcaaaacaaattaaaacaaatctcatacagtttcgaccagttacgcactatggataacacctacgcggcgttaaatactttacgtactgatattattgcgcaggcgtttagttatattgctaatccacaggtggaagatgccaatattactacattcatgcaaacaatggatgcacgtaaggcagaggtggatacgttgatgaatgaatatgtcgaactatctgcacaaactggatttgatcagcaacgcatggcagagatcaaacaactttatcaaaaaagtcgttatgacttagatcttcttgtgcaatatttaaatgaacgtaataccaatgcaattcgtttgatcttaaaaagtccagccaacgataacttcactaattcattatatgaagcaacagatttcattactgatgacgttgttaatccgtcagtgattgaagcagaagataactatcacgagatgctatggatagcctccctattcatgggcatattcctgatatttacgacattagtgctcttttggatccgtaaacatattattgtacgcattaaccaaatgattgaatatcaagaggcgattgctagtggagatttaattagtcgcattgaccatgatattacaggccgcaatgaaatagaccaacttatgttgggtttacaacaaatgcgagcgcgcttaaaagaaatggttagcgctatccgtaacagtagtacaacgatttatagtggtgttcaagaaattgccgcaggtaataacgatttatcaagtcgtaccgaagaacaagccagtgctttagaagaaacggcttccagtatggaacagcttaccgcaacagtcagaaataataccgaaagcgcacgtgaagtcactcagttagtcatgagcacagcagatattgccgttcaaggtggtgagcatagcaataagatggtgatgaccatgacagacattgccgatcgttcgcaaaaaattggtgagatcaccgcagtgattgatgatatcgcttttcaaaccaatatattagcactcaatgccgcagtagaagcagccagagccggtgagcaaggacgcggtttttctgtggtagccagtgaggtacgtaatttggcgcaacgtagtgcggaggcggcaaaagagataaaagaactcattgaatcaactattttacgagtaaaacagggtaatgatcttgtcgaacaagtcagcttatctatgggagagatcgtcacatcagttaaccatgtatcaggctcgatgaaagagattttagcagcatcagaagagcaaactcgtggcattgctcagattagccttgcagttaatgaaatggataaagcgacacaacaaaatgccgcgatggtggaacaatctacagcggcttcagcaacactaagtgaacaagcctcaatgttagatatgattgtaaataccttcaaggtagaacaagtcgcggttacatcaccacgatcaccaacattctcggctaagccagctgaaccggaaataacaaaaacagcaacaacatccacaataaaatcccatcatcatgaagccgatgacaattgggaaagtttttaagctaaataacctacaataatattaacctgcgacaacgtttaaataacacgttacatctgtattaaagacctctaccgttaataccttcaatcaaataagattggaggtatttcttaaaatcaattataaattttcccattctatataggttataaaagtcagacagcactttgattgctgatatttttctttctcatcaatcattagaaacttttaattactaataattcgccttgctaataaatcatttttttcctctagcaccttacaccaatcattagaaaattttagttattagcggttaattaaagcgaaaaaaagcaaaataagtcgttttcagtcacaaaatagataaaaaaagtaaagttttcaattattaagccgaataaatttaactgatgtatgtttgtcgttccttgctctttatcctacaaattaatgaaataggtaaggctatgcttaaacgaataaaaatatctagtggcttaatgtttattttgatcttgttttgtgccattcagttgttttctggtgctacaggcattcgtgatgcttatttaactaataagcgaatttcacagttagccgatggttttgaacagataaaaaccatggattatggttatgccgcattaaataaattacgtgaagatatgcttaatgtaatgtttgatgctcatctcaccccagatcttgctgaaagcaaaattacagatttcctctcctcttaccctcaacgaaaaaaagaagtctctagcattattacccaatattttacctccgctgaaaatgccgattttgatcgcgaaaaagtggcgaaaatgaaaaaactatttcagcgtgtcatttacgatcttgaccagctcgtttcatgtttagaaatacgagattattacggtttccaatctctttatgctcacaatacgaatgagcggttcacacaatcactttatgaggcaacggatcatcttagtgataatgtcgtcaaccacgctatagaagccgcacagggtaattatcaacgcgcgttgatcttcgcgtttatttttatgtcggtatttatcttatttacggtgtttgtcatgttgtggatacgccaccatatcgtgttacgtattaaacaagtcattgattatatgtcagatatctcacaagggaatttacttgaaaatagcaccataaaagccaaaggtaataatgagatagaccaacttattaatggaatacagtatatgcggtctgaattatcactgatagtcaatgctattcgcggaacaagtcatcatatttataatggtgtacaagagctcagtgctggtaataacgatctatctagtcgtactcaagagcaagcgagtgctttagaagaaaccgcttctagtatggagcaactaaccgccacagtaaaaaataatactgaaagtgctcgtgaagtatcacaccttatcaatcaaacctctaatattgccagtaaagggggggatgttacccatagaatggtaaaaaccatgaacgatattgcacaaagctctcaaaagattggcgagatcacaacggttatcaacagcattgcttttcaaaccaatatattatcactcaatgctgcggtagaagcggccagagcaggagagcaaggacgtggtttttctgttgttgccacagaagtaagagaattggcgcaacgcagtgcagaggcggcaaaagagatcaaagagcttattgatgcgtcgattaaccgcgtcaaacaaggtaatcaactggttgaacaagtcagtacttcaatggatgagatcctcacatcagttaaacatgttgaaagctcaatgactgagatcctatctgcatcagaagaacaaacgcgaggcatttctcaagtctccttagccgtcactgaaatggataaagcgacacaacaaaatgccgcaatggtggagcaatcttctgctgtagcgagtttactaaccgaagaggcgggtgatcttgagcaaattgttgagcaatttaaaacagcggaaagtctattttcgaagaagagtacattaacaaaacccgttgagaaatcagccaatattgggttatcgcccataaaagaaaatcaacaagactcaagaataaaagagccaaaaaaccataaccaatcgacattcaaagaagatgaagatgatgattggacaagtttttaacaagtgctaatctatttatatgtatatcaacacctcataaaaatgaggtgttgatatactattataaactgtgaaattgggctttaatactatgtgtgatttagcgattaaaataatactgcaatatttttatagtatttaacagagaagtttaagtagtaaattcgctcatttcgcatcatgattcttatctgagtctaaattgttaattaagcataaggatatttgcatggatgatgatataaatattagaccttttgattataatgatattggtagagtctatgactttaaatcaccattagttgaaggagagtattttgctctagaattaactgacactataccatcagggtcagtacctgtcgtcgatgaagattccggaatgtgcataggctatctatatggcatatctggagtttatgatgtttatgatgcaactggtgaatatttaggtaaatatgaactacctttagtatcaccattaattgatcctttagatataattttacttgggggatggtttgttaaaaatggagcgaagctcactactttacttaaaggaggtggtacatctttagtcaaagcaggaactattaaattaacagatcatttaatttcacttttacgtggacgactaaaaataggattatcacctagaactttaaaattcacacctaaagccgcatctcacatggctgaagcagaaagatatgttccaataacaattattgaaaaagcaataagatatggtcagagagggatagacactaaaggtagatctgctttaatacttaaaagatatattatcaaaataaaaaagtatcgttactcatcaaaaataaaaaatcttaatggtaaaaatataaatgaagtaaaagaatatactttagaagttgttgttgatgaaaaaacatggaccgttactcattttatgtataaatagaggtaatatgtttagtataaacaatgaaataaataatataaagttttctattattgatatacacgatttctctattgatagtgaacaatactctgaatatgataaatcatttacttttaatatagaattaacccttaaaaacggtttttttaatgtttttaattgtgaattttattattttgaattaagtgattttgtcgataatattttagatattataaacaacgttagtcataaatgtttattcacagatgagagaaacataattaacatttcctttaaaaaaataaaaaactctagcgacatttcagttcactataagttatttgaatacttcgatagtgactgctatataactggaatatttattatttctaaagaaaaactatatgacattataaatgatataaaaccttatctattagagaagaaagcatctacttagtagatactttcttctctaatactatatcctgatgtggatgccgctaaatgcctccatgtgatatctctataatctaacaatatgatttcttccggttgtctgtcattatgagatattgaattaggataatcataagttatattttttatggtggcctgttgtaatgatatactgtagtacttttcttgagcgccattttgactagttctaaaaaattctagtttgcaatctattaactcattattagatatggcgacacctagcagtggcgatgatttatcgatgggttttactatttcgaatggatgatgatgagagttttgggctcgagatatcgaatgtctaatagctaatacaagtatttcatcctcatgacctttttggtatttatttccaattgaatcatatgttgaacaccctttagatattaatccttgttgttccccagttagggtcatgtatataatgttagccatgtgattttcctattttatattttcaatattttatatataacttaagtcaggacaaaaaacaatcaaaaatccaaatatagtaaaatctcaaatgaaagaaataagagacactattttttccataattaattatttaatacaatttaatcaaataattacacctcataaaaatgaggtgttttatattatctgtaagatctctacctattttctctcttctacttttcttattatttagtgaaatacatgaatggcttttactaaataattcgtttgttctttcatttctccggaaattgatgacgctttagagacataatctgcattttcatgtgttattgattctaactgctctacagctcgaccgagctcttttaatcctgcactttgttctgatgatgcaaggctgatttcaccaataagactcgtgacattttttacatgaaccacaatattttccattgtttccaccgtctcatttacttgctttgagccaatcttaatattgttacttgatgtattaatcaatgctttgatctcttttgccgcctctgcactgcgttgcgctaaattacgcacctcactggctaccacagagaaaccgcgtccttgctctcctgctctggcggcttccaccgaagcgtttaatgccaatatgttggtttgaaatgcaatactgtcaatgacaccaataatattactgatacgctcagaacttttcgcaatatcgtccatcgtatgcacaatagtatccattgctgttccgccttgtattgctgccttgcaagtcatattagataaattattagcctgccctgccgtttcactattattactcaccgctgtggttaattgattcatggttgacgcagtagtctcaacatgacttgcagtttgttcagtcctcgtatagagatcacgattccccgctgctaattgatcacaagaaaaagcaacttgatggatttgatgactgacatcgttcacaagccaacgaaacatccgccctaattggtttacagaacgttgagtcataccaatttcatcaatacgatcaagataatcaacgttgtgttcatcacctgtagccacccgattagcatgtttattaaggatcataatcggcttcactacttgaaaataaaaaattcgctcattggctatcaatagtgaaagtaagatagcggtatgaatgaataaaccccaaccatttaaaccagcaaaccaaacacttaataatataaaaggaaatggtaataagagaagtaagcgtacacgctgctttagtgagagtgtttgtttccatgagcgccaacttttccagcccttataaatgaatacccccttagaaaaagtgtgagagggatatttaccttggttaaaagcggcatacagtgctgcggcttgttctacttcttctttttttgccgccgtcctcactgacataaaactttgaattttaccttgacgaataataggggtgacattagcccttacccaataatgatcgccatttttgcgcctatttttaactattcccgtccaaacctccccctgttttaatgttttccacatgtctctaaatacatcagcaggaatatctggatgtctgacaatattatggggttgccccattaactcttgtgctgaaaaaccactgacttcaacaaaatcctcattagcataaataatattgccattaacatcggttgttgacatcagtgttgcgttttcagctaccggatattctcgctgtgtcaccggttgattgttacgcattagttactctcctcgtcattgaaatgagatatctcaataaaaaaacacgtgctaaataactaacgtttcggctacaaagagaataactttagaaataagtataaatattaacttttaaatattaaaaatttgaatcagttcaaataaattaatcatccagactattaattagtgcttgagagcttaatactaaagccttcgcattttcatcacgcttctttaataatgccataaagataagatcggtaatggtgttttgtgcagtgcgagaagaaatagcagcactacgccactcaccttcatcagcaatagtttctaatatataatcggccatcagacctagtggtgaatgtttttctcctgtgatcgctataattttagcaccttgttttttagccacagatgcagcgaccagcatatcttttcttttgccactgtaagagatcacaatttgtaaatcccgagggcttaacatctgagcaacagaaatttgtacatggtgatcagtttcaattaaagtcgtaatacctattttctgtaatttataacttaaatctctggcaactaaacctgatccaccaatacctataatttgtacccgagaggcgtcatcaatctgttggatcacttgttcaaactggtgataattaatttgacgtgtggtatcccgaattgaattatttttttcttgtgctaatttctgcgcaataacaaccaggctatcctctgagtctatttggttatgtaatatgctggagtttttttctgaattagcattttttcggcctaaatcttcactgatagccagctttaaagaaggaaatcctttaaatcctatcttttgactaaatttcactattgctgattggctgactcccataatttcggctaattgctgtgatgataaagtcacgattttttcagggtgttctaaaatataatccgctattttacgttgatttgtcgccatccctggttttatccacgctatcttcgttaatgtaggcataatgacataatccacttaaattatactatttttataatgatttaattattaacaaatttaattgtattaaataattaattattgatggtaaagtgaataaaaaacatcatctactcaatagaaaatgttaataatattaacaatacctttataataattctgtttatgattttatctaaaattttacgtataagcacatctatttttaaacgaattataaataatgcttaaattttttttagttttttgaaataatttattccttaatatcactgcagataaaattccattaaatatcaatatatagcataataaaaattttttatcccattgataaataatcataaaattaatgttaataaaaataaacaaccaataaacactcaacaactatggtcaatcaaacggaataaataattccttgtcacagctacgattaaaattaaagataaaataatcaagaaatacacaaaacaacactttaatcatacttaatattattaatagataatcatcaacaacggtaataaataattatgtgtaatgtgtgattaaataacatatttgggtataataataatcgtagaaaatgactcaacatagctaaattagctaattaaacgcaatacaacaaaacaagagactaactaaactaaaaaaaatattatttacaacaataaaaagaaattaaatcatttattttagcctatatttattcaatccaaatcaatggaatacacatggcggttaatatccccattataatattaaatgagaaccatgctcgtctgctttgtaaaaaacgactgataaatgttccacctaaaatccataccataccagcgataaaattaaccaacaacatcacaacactaatcacaccaatcgatcccaaataaccatcaccggctaaactaaaacttcctacggcgcctagccccatcatccaagcttttggatttaaaaattgcaataatccaccttgaaacgccgtcactgtttggggcactttacttgaaatatctaatcgttgataagaagcggttgctgttttccaagctaaccaacaaagataaatgctaccaataatctttaaaccgatatgcaatgcgggataaataatcaataatgtcgcaataccaaacgcagagctaagtaatacacattgcattccgacgataatgcctgccatcaacgttaaagagcgttttaaaccaacatgagcccccgaagaggttaatagtaaattattaggtccgggcgtaatagctgcaataaaaaggaaaacgctcaacgaaacaactaggctatttgtcatagtgaaatgctcaaagatgtgacagatgttttattttcaccgaaaatagcagtatgttatttagcaaacaagcattaattcattttaataaacggaactatgtctcaatattttgatccaataccttgggctaagaatccccatttacagacacttttgcctcgaatagtgcgaagaacgccactattaacgccttattggcaacggcttaatttgcctgataatgattttgtcgacttagcatggagtgaagaacccaaaacagcgcaacataagccccgtttagttatctttcatggtttggaaggtaactttaatagcccttatgttcacggcatgctagccgcggcgaaagcgcgaggatggctaggtgttgtcatgcattttcgaggctgcagtggcgaacccaatcggcaaaaacgcatttatcattctggtgaaacagaagatgcccgctattttctgaattggttaaaagagcaatttggcgaacaaccaaccgcagcggtaggttactctttaggaggcaatatgctggcctattatcttgccgaaagtggtgaaaatgcggtattagatgccgctgttattgtgtccgcacctttgatgttagaaccttgctcaaccaaaatagagcgaggattttcgcgcttctatcaatggtatttactgaaagggttaaaacgcaatgcaactcgcaaattgatccgctatccccaatcgttacctattagtctattaaccattaaatccattaaaaagttacgtcaatttgatgatctgatcacggcaaaaattcacggtttcaaagacgcccttgattattatcgtcaatgtagcgctctccctttactcaatcagatcaaaaaaaatacacttatcattcacgccaaagatgatccctttatgtctacagaagtgatacctgatatcacaacattacccaaaaatattgaataccaattaacagaatttggtgggcatgtaggttttgttagtggaaaactctctaagcctgtaatgtggcttgaaaaacgtatccccgactggctatcaacctatttggagaaagtaaaatgatcatcccttggcaagaactatcaaccgaaacgctagataacttgattgaaagtttcgttttacgagaagggactgattatggtatgcaagagaaaacgcttgaacagaaagttgccgacgtaaaaaaacaactcgtctcgggtgaggccgtgttagtgtggtctgagcttcatgaaagcgtcaacattatgccagctgcacagtttcgccctgattgatcttacctaagttggcactatcacatcacatttaacaataaggtatagcccttattttgaaaaggaacatgatatgtcaatcaaacaccctattattgctgttactggttcaagtggtgcaggtactactacaaccagccaagcttttcgtaaaatatttcagcaactcaacgcccatgcagcctctattgaaggggatagttttcaccgttatacacgccctgaaatggatatggccattagaaaagcgaaagagcaaggacggcatatcagctattttggccctgaagccaatgactttaatttattaagttcaaccctaagtcactatagccaaacagggcaagggcaatttcgcaaatatcttcattcttatgatgaagcaaccccttataaccaattacccgggacatttacaccttgggaagcattgccagaaaaaacagatattttattttatgagggattgcatggtggagtcgttaccgatcaacataatgtcgctcaacacgttgacctattagtcggtgttgtgcctattgttaaccttgaatggatacaaaaattaattagagacaccacagagcgcgggcactctcaagaagcggtgagagattctgtggtacgttcgatggatgattatatcagttacatcattccacagttttctcgcactcatatcaatttccaacgcgttcctacggtggatacctctaatcccttctcagctaaagctattccaacactggatgaaagttttattgttattcgctttcgtggcttaacggatatcgatttcccctatctattggcaatgttgcatggttcatttatgtcgactatcaatactattgttgttccaggagggaaattaggcttagcgatggaattaatcatggcaccactggtgaagaaattattgaatggtgaaaaaattagctaaaatagatatgttatttgtgacgaaaataatatccccgtattttagggatattattttatatattaaaatttattttaaaatatcaaatttattcaggatctttaatttcaaaagagtgcgtaatattggccgcttttcctaacattaaagaaacagagcaatatttttctgctgataattgtacagctcgctcaacaattttatctgtcaacgctttaccggaaacaatgaaatgtaaattaatatcagtaaataaacgaggtgcctcttcacgacgttttgatgttaatttcacttcacaatcagtgacttggtggcgacctttacgtaagatactcaccacatcaatagcactacaaccacccgcagcaattaataccatttccatcggactaggcgctttatcacctgaattaccatccatcataacttgatggccggaagatgattcgccaacaaaagataaatcttcaacccatttaacacgtgcttccattttatttttcccctaaatacaactgagactaaaagagtacattctcataattcaactagcaattagcaaataggtttattatgctgactgcgtaaaacgagacttaatgcgttaactgtgttaaaaacaatatctgcttgatgatagtggttaagatcaatgcattattttctcatttattataatctattccttattaactttccgaattctcaggaagttaatcggtaaagataggattttaagcacgctgtatcaaaagggtgtcaatccgttttgaaaggctgcattaacgtacagaggataacgcgaatggttctcggcaagccgcaaacagacccgactcttgaatggtttttgtcacactgccatattcacaaatatccatccaagagcacgctgatccaccaaggtgaaaaagcggaaacactttattatattgttaaaggttccgtggctgttcttattaaagatgaagaaggaaaagagatgatcctttcctacctaaaccaaggtgacttcatcggtgaacttggattatttgaagaagatcaagaacgtagtgcatgggttagagcaaaaacagcctgtgaagtagcagaaatttcctataaaaaattccgccaattaattcaggtcaatcctgacattctgatgcgcctttccgctcaaatggcgaatagattacaaaccacatcagaaaaagtaggtaaccttgctttccttgatgtaacaggtcgtattgcacaaactttattaaatttagctaaacaacctgatgcaatgacgcatcctgatggcatgcaaattaaaattacacgtcaggaaatcggtcaaattgtaggttgttcacgtgaaactgtaggccgtattttaaaaatgctggaagatcaaaacctcatttcagcacacggtaaaactatcgttgtttacggtactcgttaagttgcattgaaaacagcccatttaactgatggacagtgattattttgtatgaagccccatcgcaatgatggggttttacatttgaattcactctgcttttacaaactcatcaagcgcttttcgtaacgcattcatgccctcttgtaactcttcgagggtaataatcagcgatggtgtaaagcgtattacatcagccccggcatttaatatcattaagccatgcttagaggccagtgcaagtaactcttttgctttacctgcatacagtggtgctaactgcgcgccaattaataagccttgtccacgaatttgagaaaacacagcataagtttggtttatcgcctgcaattcatccactatccaacgatgacgctcactgacaccttctaataccgcctgagtgttgattaaatcaaaagcagcattgcctactgcacaggctaatgggttccccccataagtcgtaccatgtgttcctacccccattaccgaagcgatatcctcggtggttaacatcgcactgagaggaaaaccactacctaatgctttggcactggtaataatatcgggctgtatatcatagtgcatataagcaaatagtttgccggttcgccccatacccgtttgtacttcatcaagaattaatagcgcttgatgcttatcacatagtgtacgtaagccatgcataaactccgctgtcgccggtgtcactccgccctcaccttggataggctccagtattacggcacaagtatgagagtcaatcacggcttttacagcatcaagagagttaaaagggacatgtataatatccgcaggtttaggaccaaaaccatccgcatatttaggttgtcccccaacagagactgtaaaaaatgttctaccatgaaaggcgtggtggaaggcaattatcttcgttttataaggattatgacgggtaatagcgtaatgtcgtgctaatttaagtgcggcttcattcgcttctgccccagaattggcaaaaaagacacgttcagcaaaagtatgttggattaatttctgagctaaacataatgccggctcattagtaaacacattacttacatgccaaagcttctcactttgctcttgcagtgctttattcaatagtggatgcgcatgcccaagcgctagaacagcaataccaccagcaaaatcaatataggattttccctgttgatcccaaacacggctaccttgccctttaacaggaataaaatctgctggtgaataaattggcaacattacctgatcgtaagttgccctattaatacgttgatttatcattaccccacctgaccgacatttagctatacaatgaaaatataatcactaaatatgaataaaaaatcaaataaggtttgatataaaagtggataatgacgctaaattttcattatccaattaatatttaagaaaattatttaataactcatgcccttgttcactcagaatactttcaggatgaaattgcacaccttcaatgggtaaagtacgatgacgtatccccataatttcatcaacattcccgtcatgttggctccatgctgtaacctcaaaagggacaggcaaggttgtcgcatcaatcactaaagagtgataacgggtaacgcttaaaggtcgattaagccctttaaacaccccttgctgattatggtgtattaatgaatttttgccatgcatcacttcacgggctctgataacggatgcaccaaaagcttgcccaatcgcctgatgaccaaggcaaacacctaaaataggtatttccccggcaaatcgctgtatcgcctcaagagagatccctgcttcatctggcgtgcaaggtcccggagagataacaagatgtgatggcatcatcttttctatctctttaagcccaatctcatcattacgtttaacaacaacctccgcccccagttcacaaaaatactggtaaaggttgtaggtaaacgagtcgtaattatcaataagtaacagcatattagcttatccgactgattttattatcattatctgttttaatgctattttgaaaccgttatatccctgacaaaatagctcgttattcaaccgacctggatacaacgaagccgattatcatagcacaggtgtaaaatataaatagtaagtaagaaaagctgttgatttattgcgcaataacaataatgacggtgattattcatcaattaagagataaataaagcaaacaagcgcggtactagaagatcatatgtcaaaaacaaagatcagaaataatttttttgatcgacaatatccagaatgtgagaacgcattctggatatctgttcattgactggcttaggctagagaagtgtctaacctaatcacccattattctttaaccacctcagcggataaaatcgtcacggttttaacgggtacattttggtaaggaccaatattgcgggtttgcacttgtgaaattttatcgacaacatccatgcctttcactactttaccaaacaccgcataaccaaaatcacgttgaccgtgatctaaaaaggcattatcagcaacattaataaagaattggcttgtggcactgtctttatctgatgtacgagccattgcaatggtgccttttaagttacgtaagccattatcagcctcattcttaatcggctctcgtgtctgcttttgttgcaaatctgccgtaaatcccccaccttggatcataaatccggggatcactcgatgaaaagtggtcccgttatagtaaccatcttcgacatactgaataaaatttttcgttgtgataggggcttttttattatccagtgacagttcaatattgccttcagatgtgactaatttaacaaaggtctctcccgttgcagccattgcaaggcttgtggttgtcaaggtgcaagcggtaacgagagtgacaaaaaaacgttttaacatgcagggatcctttactttaatagtctacaacttacttaatatgcagcgattttaattcgctggggcaaatagtgccaatcatttacctttatttacgcacaataaacgcatttacatcataacagggtaaattttcatgtttaattactgttataagtcgctaaattacgccaaaatagagggaatagttaattaatcgattttcgattctctatgcaaaactcatcttagtatgcatgaggaagcgcattatttcagagaggcttataccataatgacccaatttaattaccaaaaagcacatttcattatcagtgcacctgatatccgccatttaccaccagatacaggaattgaaattgcctttgcgggtcgttctaatgcgggtaaatccagtgcgttaaatgcactaacgcaacaaaatggattggcaagaaccagtaaaacacccggtcgtactcaacttatcaatctgtttcaaattgaggaaggacgacgtttagtcgatttacctggctacggatatgctcaagtccccgaagagatgaaacgcaaatggcaacgctctttaggtgaatacctgcaaaaaagagagtgcttaaaaggagttgttattttaatggatatccgtcatccattaaaagatctcgatatgcagatgattgattgggcggtggattcagagcttccgactctcgtcttgctcactaaagcggataaattagcatcaggggcacgtaaaaagcagttaatggcggtacaaaatgcactgtcagaaaaatcaggtgatatacgtgttgaatgtttttcttctttgaaaaaaataggcattgataaattacgtaatacgttaaatgagtggtttactgatactaacgaaccagagacagaagcttaactcactatccgctttattaggggaaaatatggcttccccttccattcttagcattaatcactcgtgcaaattttagataaaaaaatgccccagtcgaaataaagtcgactggggcagctaatattcagctaaatccgattacgtgaagtaaaaggtctgaaagatagaacatcttacctctgtaccctacaagagataatgtactctatttttttggctaataaaagcccttttgtaattttttttcacatgcaaacacgattcagcttgatgtttatgtattcaaacgctcaataaatgtagtttaattacatatttatgagatctaaatcacctgtaaaaagtgcttaaaaataaaacaaatcacacaaaatgtgcggtttatacaaactaattttgtgataggcttatcgcgagaccgtaataaatttgtaaattagcgataaaatgaggtattcatggctgtattaacgctactgcattttcctgatgagcgactacgcaaagttgctacacctgtggaaaaagtagatgacgaaatacgcacattaatcgatgacatgattgaaaccatgtacgcagaaagaggaattggcttagcggctcctcaggttaatgtctctaaacgtattgtcgttattgatgtttctgaaaatagagatcaacccattgctcttattaacccagaaattatcagtactgaagatgaaataatggatatgatggatggttgtctttctatcccagactcttttgctcccacacaacgctttcgctacttaaaagtcaaagcactagatagaaatggtgatgaaatcgagctagaagcagccgatctctttgctggctgtattcaacatgagctagatcacctcaatggtaaactatttatagaccatttatcgccgttaaaacgtcaacgtatcgagaaaaaacagaaaaaattaagcaaactcaacagcacccaagttgcttaatggaatgtatttaacttttgatattgttaatactaatgacttttatagtgtaagctcagtcaaacaactgggctttttattttttatccccccacacttcctattgccccttccctagctttaaatatagcaaagcgggaaaaccttatggctatcccgcttaaattcatcagttaaaaaaccattctgatatctattataaacaaagtgttatctcgtcattaatgggcttcatcccagttattaccgactccgacttcgactttcagtggaatagcaagctccatgctactttccatgagcttatggatcatcgcatttgctttttctaaatatgactctcgtacctcaaacactaattcatcgtgtacctgcataatcatatgtacatcatcagggcattcatgacagatccaattatccaccgcaatcattgcttttttaatgatatcggctgccgttccctgcataggtgcgttaatcgcttcacgctctgatgctttacgtcggatcgcatttttagagttaatctctggcagatataaacggcgtccatctaacgtttccacatagccttgctgtgacgcttgtttacgggtacgctccatataatctaatacccctggataacgttcaaaatagagatccatatatcgctgtgcttcttttcgttcaacaccaatctgctgtgataaaccaaatgcgctcataccataaataagaccaaagttgatcgctttcgcactacgacgttgttcagaggtgacttcgtctaaaggtataccaaacacttcagatgcagtagctcggtgaatatctttcccttgagcaaaagcatcaagcaaacctttatcttgcgataaatgcgccataatacgtaattcgatttgagaatagtcggcagcaactattttaaaaccatcacgggcaataaacgcttggcgaatacgacgcccctcttcatttcttactggaatattttgcagattaggatcacgagaagataaacgtcctgtcgcagtcaccgcctgatgatatgaagtatgcacccgcttagttttactattgaccatcaacggcaatttatccgtataagtcgattttaattttgccaatccacgatgttctaaaattaaacgaggtaactcatgactatgcgctaacgcttctaacacttcttcatttgttgaaggggcaccttttggcgttttcttgataataggaagattgagtttttcaaataaaatctcttgtaattgcttaggtgaagagagattaaattcttgccctgctaacgcgaatgtctctttttcaatctcagctaaacgttgagtgatttcttgggattgcatggcaagcacttgtgcgtcaatcaatacgcccttacgctccatgcgtgaaagcacagggactaatggcatctcaatatcgtgataaacgtgttttagcggtgcaatcgcctctatttgaggataaagcgcttgatgcagtaacaaggtaatatcagcatcttccgctgcatataaggtcgcttgttcaacctcaatctgattaaaggtaagttgccccttacctttaccagcaatctcttcaaatgtcgtcgttttatgatttaaatgcttttccgctaaggtatccatatcatggcggctactcacactatttaagacataagactccaacatggtatcaaaataaataccgtttaattcgatgccttcattttccataatgccgcggtcgaatttcaggttttgcccaatttttaagatggttttatcttctaaaatcggttttaaagcagttagtacctcatcaacaggtaattgctctggtgcatctagataatcatgacgcaatggaatataagcggccttgccaggctctaccgcaaatgacagaccgattaaacgtgcatcaatattattcaagctatctgtttcagtatcaaaagcaaaggcgggcgcttttttcagtacctcaacccagcgcattaagctttcatgagtcaatatagactcatagttctcttgagagataactgggaaattgtctgcagctggctgctctttgggtgttgcgacttctgcactataggggactggcgctttacggctactgcgttgagctaaccaaccaccattttgtaagtcacttatccagcgtttaaattcataacgcgtaaacatttcaagtaacttatctaaattaggttcattaaccactaagtcatcaaaggttttatcaagcgctacatctgttttaattgtcgctaattgataagaaagtttggcaactttctcatgttcaaccattttagcgccaagtgttttcgcacctcggaaactcaatgtggctattttatcaagctgttgataaatatcctctaagctaccaagtccttgcaatagccctaatgctgttttttcacctacgcccggaacaccgggaatattatctgatgagtcacccatcagggcgagaaagtcgataatcaactccggtggcaccccatatttttctttaacttcatcggggcctaaaataacattcgtcatcgtgttgataagtgtgatattgggcgtaactagctgtgccatatctttatcaccggtactgattaacacattacgaccatcactggctgcttttaatgccaatgtgccaatcacatcatcagcttcaacgccagtaatagaaagtaacggtaagcccatcgcttgaaccatttcatgcaaaggctcaatctgctcacgcagatcatctggcattggtgggcgattagatttatattcctcatacaactcatcacggaatgttttgcctttagcatcaaacacaaccgccacatgactaggcttatactgaattattaggctgcgtagcatgtttaacacaccatacatcgcccctgtgggttcacctttgctattagttagcggaggaaaagcatgataggcacgataaaggtatgaagagccatctacaaggataaaggggttttctgctatctggaccataatctgttcatcattgttctgaggttcattgatatgactagaatgccacattgcaacgcaatagacgaatattacctgagattattgacaaacttcttatcacgatagacagatataattatcggttagtcaccgacaatcattgattcgaataaatcaagcagatcaattttatcttaataaaaagacgataaatattattcgttttatacaaaataatgactaaaaataatatagaaacacctcaataatatatgattatttatattctctatattatttttaataaaatacggtaataaaatgcggtatagttaattaattaaataattgcagtaaggcaagcaatagtaccgaatagaataccgggagcattagcaatcgcaacgggatattctttacttttcacgccataataagtccataataaacagtttatggctgcaacaaaaggctggaatgggctagttttaatgccattaagattgtccattatttgtggaatataagagacatacataccacaggcagtgactgttgctatccaactgactaatgtgacaatattaatttcatttagcgtggcgagtttctgtttaattttcctcattaatttatttattgggttattcgctaatctaattccacgataaggaacaaggcttgttgaggtagattcatcgagtaaagtaagattttcaggatctgtttcgttttgcatcacgcctcctactgttatttatccaatatataagaatgaattttttatgttggataataaatataactattaccagttctagcataagtaaaagaatattgtcaaataagcaaaatgggagaataaagcagttaaattaaatgctaaataatcattattaacataaagtctacatttttcattattctaagaggttagctatttaacatttccaaacactaagcaattacacttagcagcggaaaataataaactaaaatataacaagttattgcttctttacctaaaaaaattagcgcaacacaaccataaacaaggaaccaaaagagtcagttcgttaatattgatttacagtaatattacagactatttccctgacattacattgtttgtgttattcatgaatatcctgtggataactctgtgagtatttttgtaaccctatctatattaagtgattaagtctattttcactttattaacataattaaaaaatcaatgacttacgatgcattactaattatattgaattaattagatatacatcaattaatgtggatagttatattatgaaggaaatatgaagaataaaaaaatggcactcacaaacagtgggtgccatttttatctaacattggtagctatttctacttatctatcaattagcaataacttatcaattattttttcatcagtaattgattgacgacatcagaataagcttttgcatactcttctggtgatttagcactaatgccatcatttttcattttatatttaccatcaataaccattgccggtacaccattaatttggaaatcagttaccgcattttgttgttggcttaccaatgagttaaccacaaaactattaattgctgcatcataatcttccgcttttacccctgcattaataaaggtagtgcgaatatcatcaacagagcgaatagattgtgtttcttgtattcctttaaataaggctggagagacttggtcttcaacacctaatgcaatagcaaccgcccatgcacgggtcatctctttacctaacggccctaagaagtcaacgtggtaacgagccattttggtgttttctggtacatttttttcaactgtgctattgaccttatacacttcagaaaactgatagcaatgaggacaataaaaagagaaaaattcaaccacttgtggagcacctgcaacaggcttagaaagatttgtatactgcttaccttcagaaatatcggcagctgaaacaccaaatgctaacaccatacttgctaacgccagccaaatttttttcatttcgtattatctcctaaaaattaatacattgggctaagttgtaaaggtggctcatttaattgctccacttgccctttaaataaagcgagttgtttaaaccaaaagtcttgctcttgaaaccaaacaaaggttcttggaaaagcaggatccttccagcgctttaatacccatgcgatataatgcaccattctcatcgcacgtagaggttcaattaatgatagttctctcacatcaaaatcttgatattcattataagactcaagcaatgtatctagctgtataagctgatcttgctttgagccacttaataacatccaaaaatcttgaattgcacttcccatacgagaatcatcaaaatcaaccataacgacttcatcacgccacaatatattgccgggatgacaatccccatgtagtcgtaattttttccatgttgagtctgataatttaggactcacttcatgaataattttatcaatagcatcaataaattgagattttaattgcgttggaactaaatcactttgttcaaattctaattttggcgcgaccaaatagtccgcaacagacagtgtcggccgatattgatagctcttttttctacctatttggtgaatacgtcctaatgtccgccccacctcttcaagctgaaatagattatcagtttcatatgctcttcccccaatacttgggaataatgcaaaataaaacccttcattagaaagatgaactgtttcgccttttacctcgataggcgctgcgacagaaacctgtgcctcttttagcgctaaaacaaattcatgttcttcttttatttgtgaatagctccaacgttgaggacgataaaatttcaccacataacgttgtttgtgctcatccataaactgaaaaacacgattttcgtagctgtttaattccgtcagccctgaatcaggataaaacccaatattaattagcgcatcccaaatactatcgggagacaatccttgaaaattaaatgaggcagatatggccatgtcctatcctgaaattaatctttaatcacaccgcgagcacgtaaaatagctgttttgaaatcttcttcataatctttcttcagcccaggaataacatctgtgggtgcggtattgcgcatttttagatgatagatcaaaatatcatcagttagatcagcaagttgacctttaaaacctgcttcatccgccagtttctgtaataattgaactaagtttaaatcagaatgctcttcccatactgggtgcaataattccatcacttcattaagacggtgacatttcatacaaaaaatccttattattaaaataacaacaaagtaccaagtattctctaagagaaaaagacaacctctgtcaatctgcgtaaatattacgcttttttaaaaaaattgctgttgctttacatgtaaccagaataagttcgtgctttctattactatatcgtctttacttgataagtattgttcgcaatttttcgcaaactcattcacaaatattgactatgaaaaaccagaatatcacaggcggtatactcgccggtggccaagctactagaatgggaggcgctgataaagggcttcaactcttacatgggctacctttatacctccatattgcccaaaaattatcaccacaggttgcctctattctgattagtgcaaaccgtaatctggaacgctatcgccaaagccagtatcctgttatcaccgatgaaaccagcgatttttccggtcctttagctggaatgctggcattattaaaacaagctcaaaccccttgggttgtgtttgttccttgtgatgtcccctattttcctagcaacttggttgaaacgctctatcgtcacaaaggggatgccttagccgtctatgccgacgatgggcagcgagagcacccaacactggcactgttaaatcgttgtcttattccaacacttgaggcttatctcgctcaaggtgaccgtaaattaatgctatttatgcgccaaatcgccgctaaaccggttttatttgctaatcaggccgcagcctttattaatttaaacacacctgaagatatagcaaacgccaatcacatagcaaaataggagctcataagatgacacaaaatcagttaccgctattagggatcaccgcttggagtggtacaggtaaaacaaccttactaaaaaaacttattcctttgttgcgtaacagaaatattcgggttggtatgataaaacatacccatcatgatatggatgtcgataaaccaggcaaagacagctatgaacttagaaaagccggagccgaacaaacattagtcgctagtcaacaacgttgggcattaatgaccgaaacccctgatttagctgagctggatttgtactatctcgcttctcgttttgatgcaagtaaactcgatatgattttagtggaaggtttcaaaacagaggctatccctaaaattgcactttaccgtcatatcaatgagcgaagtgttaatgagttactggatgaacatgtgattgcactagctagtgatagtgatttagacacatccctcccactgctagatattaattcgccagaagctattgctgattttattattcagtggctaacggaaaaaaaatagccataaaaaacgctaaagaaagttgcccttctctagcgttttataaaattggtttaccttaaaataaggtaaaatacagggggtctttatttagcaggacgaactgcaatcacttcaatttctacacgccatgctggattagccaacttagccacttggaatgctgaacgtgctggtaattgattggtttttgaagcgtcatagaacttagaataaccgttcataaagcctttaaaatccatagtgccgttattctcttcaccaccaactaagaatacttgcatcttaaccacgtctttcatatcaagaccaaggttattcaggttagttttgatttgttctaaaacattaatagtttgttcttcggtattaccgtaagaagctaattcaccttctggtgcatctgcggatttcttagtaggcactttaccacttaagaaaaccagattattacctgcattaatttcaactgcttctgaaataggcataccgtctaatttatgatgcacaacattctccgctgcatttgcacttgctacaccgaacacgaaaggtaaagcaacaagtagacttttatagcgcatgaaaactccttaatgtgtttaattacagtaaaacaagggtttacttcttaaaacgatccaaactaaacggcgttggatcaataacaggtttcttgcccatgacaatatcagcggtcacttcacccgctgccgggccttctgtcataccccacactgttgccgtgttaatcactaagcctgggtattctttgacctcagaaatgataggtaattcatcaaatgttggactcacaacggcaccccaacgttcaacaacttctgatttttcaaatactgggaattctgttttcattctttggaaaacagcatctaagtgttgcgtattttgtgttgccgtggcaactcggaattgttcgaatggtgttttttcatctaaattccaagaggtcggcattttaaatgaattaaatagatcttcaccaatagagaattccaacggtaactctccgccacctaataagtgcataaatttaggccctagcaggaagctatctttgactattgaactcgtaaagatacgtggtgcaacggcataagtaccatccgcttgttcgcggaaatgaataccattaggtaaatgcacattaccacgtggtgcaccaggaacccctgagacacgttgttgtgatagatatacattgagcgttgggatatcaatacccatattgcccataaataaacgcgaccagatacccccagcgagtacaacttgagacgttttaatcgcccctttctcactcaccacatcagagattttaccacccgcagtttcaatacctcttactgcacagttggtataaattttcacaccgatttgtttggcataacgagcgagtgcaggtgtgcctgtttcaggatcaacagagcctgaatcttcttcaaatgcagcaacagtccatggcgtttgagcaccgactaagcgatttgatagctcttcacctttaatgatgcgagtatttaatggtgtatcaaaacctgccgcttctttagctgttttgatccacgcttgagctttatctaatgctttttcatctgccagcgcttctacacgaccttgagtacgataactggtatccgcaccaattttctcattcatgccacgccataatattttcccataatggtgtaatgggaagatttctggcgatgtttggtaactaataatttggctgtatgcacggcctgattgctcaccggcaatctgacccttttctaagatagtgacactcataccacgttcagcaaggttaatagcggtcatgatcccttgaataccggcaccaataatcactacatctgcttctttaggaagagccccttgcgtaccttcaacaaatgatgctcttgatttagcttccacaaatttgccgtcacggcgaaccattggaactaaagccgcaccacctgctaaaacgcccgcagcaccaacacctaaaagtagctttctccttgaaatgttcatcttttacctcagtaatagtcttactatttatattgttattagattattttttagaggctttataatatcatgttttattataatgttaatgaatataataatttgttaataatactaataagacataataccattagaaacattatggttacttataaaaaaaacctattgataataaagtggaacaaaagagtcgaaataagtattaacttgaattaaaaggaaaagtatgtcttagatggaggtattgataagaaagggtataaatattttattaacatttaacgactgatgttgtatttaaagcgaccatttatgcagataaaataaatagactcgatagcacgattagctaaaataaaaagcgaataccactatagtagtactcgctttttaattaaatgtgaaaaaattaacgcattgtcacaaattcttccgccgccgttgggtggatagcaacagtatcatcaaaatctttcttcgtggcacccatttttaatgccactgcaaaaccttgcaacatttcatccatgccaaaaccaataccgtggattccgacaattttttcttcagcacccacacagactaatttcatccgacaaggctgacgatggcgtgtcactgcactatacatggcagtaaaagaagatttatagactttcacttgctcagcgccatattgctcaatagcttgaggttccgttaaacccacagtaccaatagctgggtgactaaataccactgttggaatattggtataatctaaatgttcattaggtttattattaaataatcgctctgataaacgacgtccagcggctaccgcaacaggggttaattctaccgcacctgtgttatcacctacggcataaataccgggcacattggtattttggaatttatcaacctgaatataccctttttcatttagcttaacacccgtagccgctaaattgatattatctgtagcaggttcacgaccaatcgcccaaattaaagtatctaccgtctgctctaagccattttcaagttgtaacgttaagctaccgtcggcatttttaaccacagctttaggaactgcatgggtgtgtaatttaggcccttccgcttccattacttccaccagcgtatcgacgattagtggatcaaaactacgtaatggtgcatgtttacgcacaaataagtgtgtttcactccctaacgcatttaatacacccgctaattcaacagcaatatagccggcacccacaacagcaacacgttttggtaatgcgctaagttcgaagaaaccatcagagttaataccatattcagcccctggaatgtttggctgaataggacggcctcccgtggcgataagtatattatctgcggtaattttttcaccgtttacttcaatagtatgcgcatcaacaaaacgggcaaagccttggataacatcaactttattattacctaatacacgttcataagattggtggatacgatcaatataagcagtacggctactgattaatgtatcccaatcaaaacggtttactgtagtatcaaaaccataatcaggaccgtattgatgaattgcttcggcaatttgcgcagcatgccacatcacttttttcgggacacaaccgacattaacgcaagtgccacctagcgctttcgcttcaattaatgcacatttttggccatacatagccgctctattgattgatgcgatgccaccactaccgccaccgatggcgatataatcgtaatgtttgctcataattgatctaatccatttatctgtagaaaaataggtacctaacaggctaattctttcatgtaataaagtctattatgacaaattttattacttagcaggttaggttttcgcttttacagtaataggtaaaacagtaataaatgacttattctggtacaacccattcaactaatgtgtgtccagtaccttcaggaaccaaggttttatgtagccaaggcaagatagacgccatttgtgatgccaatttccaaggtgggttaataacaatcatacctgatgctgtcatacctagttgatcactatctggtttcactgccaactcaatttgcagaattttacgaataccggtggcctctagctcttttagcatccgtttaatttgttggcgatgcacaacaggataccaaattgcataggtcccggtggcgaaacgtttatagccttccacaatgcctttaacaaccgcactataatcttgtttaagttcataaggtggatcaattaaagcaaacccacgacgactggcgggagggagttttgattttaattgtccaaagccatcttcccgacacactctcacacgtttatcgcgggaaaattccgtacgtaataaagggaaatcggtaggatgtaattcggttagcattaacagatcttgctcacgcaataatttagcagccaataaaggagagccgggataataacgtaactcatcagatgtatttaacgaaccgaccgcctccaaataaggcaagataagctcaggcacctcttcttgttgccataagcgtgcaatgccttctaagtattctcccgtgcgagtcgcatgtgcattggtgagctgataacgtccagcgccagcatgagtatccaaataaagaaacggtttttctttctcttttaaagactcaataatcagggtttgaacaatatgttttaatacatcggcgtggttgccagcgtggaaactatgacgatagctcagcattctttatcttccgttagaaatgggcatagcaaagtaattaacttactctgaaaagagtgaataagctaagtgtatcagaaaaagctgaacttctttattgaaagaaaaagaaacattgtgtcttggcaggcagaggttatgataaatcaatatttaacttaagtcagataaaggaatagaatgaaaaaatatatttttactgcaattattcttagtttaacagctagttatgcatcagcagaaacagcggttaatggttgtgacatcaaaaaacagaatattcaacgacaaatcgactatgccaaaatgcatggtaatcaatatcgagtacaaggcttagagcgagcacttaataaagtagaacgttattgcactccagaaaaggttgttgaagatacccgcctagaattacgtgaaaaacaactggaagtgaaagagcgtgaattagaattaaaagaagcgcaacttaagggagagcgcgataaaattactaaaagagaagataaacttgcgcaagcaaaagctgagttgaaagcagctgaagaagagttagagctactcacaaaaaaataatgccccgtaaattcccattatgttaagccatataatgggaattattattcattcgaactacctgctaatcataggtttgcttagataaaaagcgcataactgttaaaaatatcatcatacttaagccaaagcagacaactctgctaccctaatagatagctaatgataataagcattaagttatgtaataggcataaccttatgctatttttcaataatcattatcataatagtactcaattcttaagaatggactgatttaattaaagaggatatatgtcagaagagacacagaaaaaggcatccaataaaaacactcaactgactcagcccattaagcatgggttagaaaaagggcttcatggtggaaaaaaagccattggtattggtataaaattcactaattttgttaccaacattccctttattgctcaccttattcgagcggcagagcgttttactgaccgaatgggaaaccagtttggtgcggctatcacttacttctcatttttatcattaattcctgtactaatgctctcttttgcttgtgcgggttttattttagcttcaaaccctgatttgttggccaaattaattacgggagttgccaatagtattgatgatccaactttagcctcaaccgttcaacaaagtattgatactgcggttcgtcaacgtacaaccgtaggtttaacagggttagccatcgccttgtattctggtgttaactgggtcgggaacttacgccaagccattttggctcagtctcgcccgatatgggaacgcaacaaagaggatcaagaaaaaatttactttcgttattttcgcgattttttagcccttatcggtttacttgttgcacttgttatcactattacactaacctccgttgctggctccgcacaaaaattgattgtgcatacattaggtttagatggtattgaatggctcacacctgcttggacaaccattggtttaactatctctattagtgccaattatctgttatttttgtggatattgtggatcttacctcgtcaccaacctaaacgtatctcattattaaaaggaacgcttatcgccgcaattggctttgagatcttaaagtcggtgatgacatggttattacctagattagccagttcaccttctggtgcagcttttggctctgtgattggtttaatggctttcttctacttttttgcacgactaacactcttttgtgccgcttggattgcaacagatggacctaatatgcgcaaagaaaaacacaagagtgaaacgcaatctatcacctaaaattgtaacctcacgagatagggttaattccctgcattaaccacctatcaataatgtaaaacgtaataaggaaaaataaatgccatacgttaatattaaaattacccgcgaaggtgcaacagcagaacaaaaagaacaattaattgctggggcaacacagcttttagtggatgtgttaggcaaaaatcctgcgacaactgtcgtcgttatcgatgaagttgatacagataactgggggataggtggtaaaacagtaaccgatttacgtgccagtgcaaaaaaataagctagcggtttaacatataacgataaaaaagctgaaaatagcgttaggctatttccagcttttatttattaagttaatgccgtactacttatctattttgtctgttgtgcatctgcctgcaccgaagctttttcaccagtagttaacgatgttttagccgtgtttgagctattcgctgtttctgggtgaacttgcttttcaaattgcacacgcaattcacccaagtttaccgttggcgtctcgctactttgcgttaatacaaaagtgatatcctcagatagaattctcgataactcttgatttaacatctctttcgttaaacccgctaaaaatgcttggcgtaaacgctgatattgctctggtggaatatcaataatattgctttgctgagacaataaacgctgattaattaagatagaagtacttgttttggcataacgcgcaaacaattgagtgagttgaatttgcttttcttgaagtaaatcttgatacaattcatcactgacaccttgattacgtaattcgccaagctcttcccccacccaagtggcaagtgcaggaatatttgccgttgctgtatcaacatttaacgagcaactggctcgttgatattgcactcgacaatcgatattcacttgcgtactttctttttctttacgctgttcgagactacgacctaagtgcacaaaaatcacttcacgcgctaaatcacttaaccaataacggctcagtgtgtcagaatctttcactggtgaccaatctagatcccaaataagagagatttggtcattttttcgcatgggttcttgcacatacaatgtttctggtttcatatcggcaagaacaggcacaggcacaggtgtcacgcgttttccttccagagaagaaaatgcctgattaatactttcggttaagatacgattatcaacattaccggcaatatataacgtcatcatatctggggtataccaacgctgttgataatctgataactcttttgtatttaccgaatgattaaccggtttacctggattatggccttttagatttgagccttctagacgtgaacgccagataggatcatcaatattagcgggaaaagtcaccaccggaagcggtgattgaatcgcatttcgaaccgcatcttctgtatattgtgccggttttgctatgcccgccaataatgcaaaggcatcttttaataattcaggctggttattaggcaagcttaagttataaaccgtaaagtcataagagacgatcatcggtggcaatggataatcaggatcgaatgcatttttccaaagattatcgcgtttttctggtgttaatccggtgttttctaacacattcagttttgacaccagagatgaaaaccctgtttcactgcgcttttctgataaagagcccgtattcactaataagcgaatttggatcctatcatttgggcgttgtggtgtttgtaaaatttgccattggaaaccatttgcgagtcgcccttcttgccaagcaggatcaggctgcagtgcttcagcttgaacctgacaaatagcagcgctgaacataacgcttcccaataaaattcgtgtcattgcaccctgcatgtgaacctctgttttattaatccttggtattaaaccacttatgaggtttaacaataaatgccggaagacatgttagatgtaaaatgtctgtatgttgcgttgtcatctttatcaccacagaacgctaaaataaaatcactcacgtgattagagtcatagtggtgtaagaaggttcagatatctgactctttttgatcagatttttgttgattatatcctttaatcagcaaaccaatctcatcatcacgatgagattctgaacacgacaacatcgaaacctgattacttttattaagagtcacagcaatgtggcgcaacggttttaccataatacgattaatacaccagctaattgcaatagtgaggataagacccattaataaataagtcgtcaacatcagtgcgacagtattactcgcaaaacgataaaaacggttagtatctgcctgtaaaataagatgactggtataggctttatcgtcagcggaggtaatacctaaaggctgtaaagggatagtcacttcaacagggatgccaaacagccaacgtgaaaattgagaaactgattttttcggtgcaaaatctaagttcatcacctgaacattttcgggttgtgtcacaatcgctttacccagtatcccggtcgtttttaaactaatgatcagttgtttggcatcatttaaatctgaacgcaatagcgcatcagctagcggttgttgtatactgactgccgcattaaatagctgattttgataatcttctcggcgttgatcaatcaaataaacaagctgaatactaataaaaatagcaatagtcaccaacgtgacacctgcaacagctgccatctgtttgattgttagtgaacgtttgagatgaggtttcatcagtgctatttccagtaaccatgcttgaacaacggtgattatactgtattttttcgattatgtatcacaatcaataaagaaaaaacacacgaaagcctgcatctctactcaggttaaaatcaataaaaagaattatctggctataaacacaaatagccagataatattcatcttttttagatgataattttattactcttttaattgttattattaaatatcatcatttaaattatttagttttatgtgggttaatatcgaaaataaccttgtcattctccgttatcttgctagcgaacttaaataagctatattcattaattaaagaagttttaaactgacctttaatattaatttcattatcagctatcaaatctatataacttttgcttaatccatcgtctgaaggcctttctttaaatttaacatctgttatatttatgttgtctccatgtgcaaaaatttgaccaaaaccaagcatagatagtttatttaaattaatatcattaagcttatttttatctaagctattattgtcgttaccatctcctatcgggatatttcgataacctaaaaatctgatactactatttctcagcgcaaatctacccgagtagttattatcttgatgggcattaaatgagacaccagaatttctgacataagaagttgttttatcaatatcaacattaatatttctcccattaaataaaacttcgctatttataatagctagtttacctttaaagttaatattgtcactttctatatattgaagtgctgatcctatttctttaccctcagcctccaactttcttttttctgcttgtttagcttcatcgattttaagaacagcactctggatcttgttatattctgcttgctgttgatcagcaactctcctagcttcagtagctagttctcttattttctttagtttatttttatgtataaaatgaggatctaactccattattttttcttctaatgcctctaattctaatgctatttcagctgatttttttgcatctatttcaagaaaatataacttcatagatgctaacatgaacattagatctacttcattatatgctctaaattcattttttttattaataattccgaatactgatttttcattagcattaatttctttattacgaatgatattgatttttttagtgattagatccccatcaagattaaaaatgccaccttgtagagagaaaagatctgtttttaatgaactattttctaaaatagagaggccttcttgattatctttagatagctcttttccttggtcacctttccaatcataatcaacaaaactaaccgtttcatagccattgatcacattaaaaactgggattttatttttacccaatatattaatacgattagaaaaaacattgattgtttgtttttcattgaaattattaacattctttagattaacataaccatctgataaataaatttttttgcctgtaatactatctaacttccctgaaattaacattaccttatctgaacctgaaaattgacacccgtagcaatcaattccatttggattggcgataatcaattctgcattttgtcctaaaacagagattttaccctctaatgaactcgttttttttgaagttacttcgttaagaataacttttgcttttacttcgctattatcaatatgaacgccttcttttccaacattaaattgttcaaaatagttaactgataaattcatatcgtttgctttgttgatagaaatagtttctgaaccatctccattcttgctcactgttgtgtttgcagattttcctgcatctacaataacgttattggctactgcactattatgcataaaagcaaatgaaatagagataactagaagatttaatgatggcaattttttataaaacataacgtcccttttatttagtaaatttaaagggagactaaataataagaaacgctagtcatataaaaataagaacaacatataatatcattgttcttattttataaaccaaatttatcaatctattgattaaaactcgccgtgatcttgctctacggcaaaacaagcaatcaactgcccatgatactcttttaaagtcggttgtaattgtgtacacattccaaatgcgcgccgacaacgagcagcaaaagcacatcctggtggtggatttaacggactaggtaattcacccgttaatttaattctctctcgccttaatgtcggtgttaatcttggtgttgctgataataacgcttgggtgtaaggatgttgtgggttttcaaatatctgtgttttagtgcccttttcaacacagcgccctaaatacatcaccaccacttcatctgcaatatgttcaacaacggaaagatcatgggaaataaaaacataagaaagtcccatctcttgctggagatccatcattaaattaagcacctgagctcgcacagaaacgtctagggcagatacaggctcatcagcaaccacaatatcaggttcaagcattaaaccacgggcgatagcaatacgttggcgttgtcctcctgaaaacatatgcgggtaacgactatagtgctcagcctttaaacctactttcgccatcatagaaagtactttttctttacgatcttgtgcacttaacgtggtattaattaatagaggctcttctaatatttgccccactttcttacgtggatttaatgatccataaggattttgaaagacaatttggatcttttggcgccgtaatttttccgcagatttatctttaactaataaattttgcccttgatatgaaagctctcctgaggttggtacttcaatcatcgttaataatcgacctaaagtagacttaccacagccagactctccaaccacggctaacgtttttcctcgctcgagctcaaaagagacgccatctagtgccttaacggttttttccttcgtaaaaagtccacctttaacgctgtaatatttggcaagattaaccgcttttaataaaggcactgcagtattcggattaacattagccatatgttggtctccctgtatcatccaatggtgtatgacatttcactcgatgtttacctatctctttcaattcgggctctatctgaaaacaagtatcctgtgcataggggcaacgaggattaagtaagcaccccatcggtctatcataacgtcccggaaccacgcccggtaatgactcaagccgagctttatcactcgcaaattcaggtaatgcttttaataaagcttgcgtataaggatggcgaggcgctttgaaaatttctgttgcgaggcctgattcaacaacttgccctgcatacatcacaataatggtatctgcagcttctgcgactaatgccaaatcatgagtaattaacactaacgccatattttcttgtttttgtaattcaagtaatagctcgataatttgcgcttgaatggtgacatcaagagcagtagttggctcatcagcaatcaataatttaggttggcaagcaattgccatcgcaatcatcacccgttggctcattccacccgacagttgatgaggataaacatttaaacgtgatgcgggatcaggaatacccaccagcgttaatagatcaatcgcccgctgtttacgcgtacgatgacttcctccttgatgaactttgagggcctccataatttgataaccgaccgtaaaacaagggttaaggcttgtcatcggatcttgaaatatcatggcaacctcagcaccaaccaaatcacgacgttcagattcagaaatttgcatcagatcacgtccatcaaattgcaaggcttctgctgatactcgaccgggaaaatcaataagccccataatcgctaatgaactaactgatttccctgagccagactcgccaacaatgcccaccacttgaccttcttctacttgataactgatccggtctaccgctttaaacggagtatcttcatcaccaaagtgaactgataattgatttatatttaataacgccatgctcttactccgttactgctttaattttggatcgagtgcatctcgtagaccgtcacccattaagttaaaggctaaaaccgtcaacaaaatagctaaccccggaaaagtcactacccaccatgcactttgggtaaattgcagtacatcagataacatggttccccattctggtgtcggtggctgtgcgcccattcccaaaaaacctaaggcagccatatctaagatggcattagaaaaacctaaagaggcttgcacaattaaaggagcaaggcagttaggcaagatattgataaacatttggcgtatagagcctgctcccgcaacacgagacgccacaacataatcacggttaatttctgttaacactgccgcacgcgtcagtcgaacataatgaggtagggcaacaaaggttaaagcgattgaagcattaataatcgaaggcccaaaaatagccactaacactaatgctaataaaagactgggtaatgccagcataatatcgactacgcgcataatggcgatatcaacgatgccaccaaaatagccggccattaaacctaaaataatgcctaaaatcagtgaaagtataacgacaatgcaaccaacgagtaatgaaagacgcgcaccatacattaagcgagagagaatatcccgcccaacatcatcagtacctaaaataaaactccagcttcctccttcttgccatacagggggcgttagaagaaactcacgaaactgctcattaggtgcatgaggcgctaaaacgcctgcaagggcagctatcaacagcataatgacaatataaattaagccaacaaccgcccctttattttgtttgaaatagtgccaaaactcttgaaagggggtcattggcaccggtgcactaatgaccggtgttacgttattttcagccatgatgcactccttatttcttatgacggatacgtgggttaacaatgccatatagcacatccactaatagattcacgaaaatgatcatagtggcaatgagcaatactcccccttgaacaacagggtagtctcgacgttgtagagcatcaattaaccagcgacctaaacccggccatgaaaaaatagtttctgtcagtatcgctccggctagcatcgtaccaacttgtaaaccaatcaccgtcacaacaggtaacattgcgttacgtaatgcatggatcaaaatcactcgtgcacgacttaatccttttgctctggcagtgcgaatataatcttctcccaatacttccaacattgccgaacgcgtcatgcgcacaataaccgctaatggaatagtcccaagcacaatggccggtaaaataatatggtgtagcgcatcaagaaaatcaccttcttccccccaaaagagcgtatcaatcaacataaatcccgttagtggatagctatcatctagaaagacactatccgccaatcggcctgatacaggtgttagatcaagcttcactgaaacgagcataatcagcatgatcccccaccagaagataggcatagaatatcctgcaagtgacacactgattgccgtatgatcaaaaatagaacctcgttttactgccgcaagcaccccaacgggaatgcccactgaaacagcaaaaatcatggcacaaatacctagctctaaggttgctttaaatcgtggcaaaaattcatcccagacaggaatacgactttttagtgaaatacctaaatcaccgtgcataatgccgttaaggtaatttaaatattgttgccatagcggtttatctagtcctaattccgccattaaataagcgtgacgctctggtgataatccacgctctcccgccataatcatgaccggatcacccggaataagatggacaaaaataaaggttaataacgtaattccgataaacgttgggatcacgagccccaaacgctgaaggataaattgcagcatatcctaattctctttttacacatcagctaaaagatagcgctgataaatcaggggaaagcccctgcgctcacagtgtactgaatgtattgattattattggatagcggtacttctctaaacgctcagagaagtaccgtggtaaagataactcagctcgttaatatcacgactattttagagagacattattaaagtggtgtttacctaatgggtcgaccacatagttctctacttttttactgattggttcatataccgtggagtgagcaataatcaatgctggcgcttggtcatgcatcaccacttgagcttgcttatataactcaacacgcttatcgtgatctgccgtgatccgcgcaggctggatcagatcttcaaacggcttataacaccatttcgagtagttagagccttgctctttcgcagcgcaactaaacagtgtggcaaaaaagttatcaggatcaccgttatctcccgtccagcccatcattactgcttggtgttcacctgatttagcacgtttcagatattcaccccactcataactaacgatcttggttttcacaccaattttttcccagtcagcttgtaccatttcagccatacggcgggcattagggttatatggtcgttgcactggcatcgcccataaatcgatagtaaagccatctgcaaggccggcttcttttaacagtgctttggctttttccgggttatattcataatcgacgatgtcatcgttataaccccacattgtcggtggaataagattcttcgctttctggcctgcgccttgatagacagcttcaataatggcgtctttattcaccgccatacttaatgcttggcgtactttttggttatcgagcggttttttctccacattaaaagagatataccccacgtttaatccgggttgttccagtagctggatatctttattttgtttcatcttggcgatatcagcaggatttgggtaaggcattgcctgacattcgttcttttgtaatttggcataacgaactgaggcatctggcgtaatagagaaaactaaacgatctatatcaggttttttcccccaatatttatcatttgctttataaagaatacgtgagtctttttgatattgttgcagttggaaaggtcccgtaccaataggattgagatccactttctcaggagtccctgctttcatcatattatctgcatactcggcagaaagaatagatgcgaagtccattgccatatcagccaagaaaggcgcttctgaacgggtaagtacaaagcgaaccgtattgtcatccactttttcgatcttctcgatcatattattcatatccatcccagtgaaatattcataacttccaccagagactttatgataaggatgatttggatccatttgacgcataaatgtatatatcacatcatctgcgttaaattcacgagtgggcttaaactctttgttgctatgccaactaacccctttacgtaaatggaaagtatacaccttaccatcatcgctcacttcccaactttcagctaagccgggagtaatttcagtggtgccgagtttaaactcaactaagcgatcataaagcggtactgagcttgcgtcataagtcgtacctgaggtaaatagttgggggttaaatccttccggtgagccttctgaacagtacactaatgttttcgcttgcacacccgctgaaatagccaaagcgagtaagccgattgtagcggttagcaaccctgtctgttttttggagcttctcatcattattctccgtcattattctgttgtgttttttggtttcctgtttaaaaacggaatacctttttattttgtcattgttcaattaaccaactgtattcgtttccgtcaataaggggctttacgccaaaatgaacaagttgcaaacataaacgaaacaaataccaaacaattacaggataaaaattggacaaattgatttaatggtagagaattaaaccacacattaagtaagtcttaagttaaatgactatttaaaaaaaaacgatattttgtgattgaacgcttaaatattaaacgaatatattgaaatgaaacaaagaagtgggtggtttattctgttagtagcgaagaataacaccagtatatagaagataatcagcgcaatactccgttaatccaaagagagaaaaatacctttttctctctttgactactagtatgctatataagccaataatctatagttatttattaaataatttataaaaacagtagtaaaaaatataaaataaatcaccataatcagaagttaaattgggtattaaaattaaactgcgatcctgttgcttctcgactagaaggggctgataacggtatgctccatactaactgataacttagtttcttaaagctaccttctaatcctattgccgcaccaactaaatatttatttttattataaaaaattttttttctatcttctgaaacggaaccataatctatggcggaaaatagcatttggttattcaagggtgtaagccaagtaactttatgtcgggaaacaaactgattggcatcagaataacctttgccggactcaaaaccatacacgctatacagaccaccaatggttgctttatcaagtaatccatcaatatctgagcgagtcagttgaaatatcatttctggttgataaaaaaattgctgtgaagtgattttaaaaggaattaatgcatcaaaattaagattaaaaatgggtacaccattaagggaatctatcggtgatagtcttgcgccaggaataaaaacactctgcttataatgaagtttagcattaaggtaaccccctctcataaagcgataattttgctcaatacccgcattaacataaggactgcgacgctcatggactgataagcgatagcctgacacttcattgcgataagtgtaatattgtattccaccacttaaagtcaccgtacgctgtgttgaaggtctaaattggcgctggatctcaaaagaaagaagctgttgacgcgttttttgtaactcttttgtcacttcagagactctcatttttgaaccaatatcataaccaaataatgtcgcacgccaataatgataaggtacttgccataaaaagatctgctttttgatgcctcttgattttaaggtatcgagttgacttgaaagaataaccattaaagtatcattaagttgcgctagattaccaaagcttagccttgtagtaccaaatagatctccgtaaattttctgctccttattatcaatcgataccgagcctgccattgtcctttttcccacttgagaaagagaaataattgactcatgttcttttgacgagggttctatctgaattttgacattactattaggacgggatctgaaattgtcagccccctgttcaatatctttaacgtttaaaatatcaccttttttgacaggcactgcctgtgaaatcaaatagcgtttatctgtcggggcttcggaaacaatgtcttgcactctcccgacatttaatgtgatatccaatacctcgtcatcggcataaagatcaactttacccacctcactggtcacataacctgcatcataaagcagcgcattcagaatattgatatcttgttctaacaatgcctgtgactgacaatgcccaactaattcagcttgccattttgccacttggcgttgcagtgatgaggaagaaaactcatcgagatgatggagttttacctgtttgattgaaaaacaatgtacagaaggtgtgataaattcccttttattttgtggtgctaagttcactaaagagacattgtcattttgttgtagtaattgatctctaagttgtgtttctgtcggtaaatctactggtacagggggatcgatatgactttcattcgctacagaaaaaaaagcacaacaccataaaatacaatagattaaaatagacaactcaatacgcattcaatttacactcttatcaccggaaataggagtgctatgtatatgtaaagagaaataaaaaagatttataaaaaccgtctttttactctgacttacctacacagttaccaataatgcaactatgtcgacttatcagatcagagagtaaaaaatcataagcgattatttataaagagatgccttaaaacgacaaaaccccgctttaaaaaagcggggtttctaaatatggtcggcgagagaggattcgaacctccgacccactggtcccaaaccagttgcgctaccaggctgcgctactcgccgaaaacgaggtgcatcttactgcctgaaagccaaagcgtcaatacttttttcttatctcccaactgttcgtatggttttcaaccaaaacgactgatttttaactttttattagcactattgctgaaattaaccgcatcataaaccctacttttacttaagttatatgaaacagctatttttctttacagttatcagaaaacatcatgaaaaatgacaaatttattctttattgttatcgtttatttcatgcactttttatataattaccctatgtcaaatcagttaggtgaatttagagcatgaaatcacgttggggcattagcacattacttttattcgtcaccacattttcagtccaagcgactacatcacaaacttgtcgggtttactttaaagaagccgataaattcttacaatatattgctacaagagatgacttaaaacagaacatgcctgaaataaaaggtaattttgaacaaaataaaaagttgatcagttcttccaccctaaaagagcaaaaagcaatttgtgaaaaaggaatgcaagagcttgataaccttaacaagatgtttggtccaaaagaagctacagcaaaaaaataaatataaataatgactaaataataaataagtgattatatttagtcttatttataataattaggttttatttccagtattaagtgtatcattagtgctacctaatttttttatcctttctttaggtgaattatcactgttgtcatcatgttgtgtataataatcataaggaagcaataaagtatctaataacgcactaaaaggaagatcaagaataactaacggtttcattgcccaccctgtttcatcatcagaaagcatattaacgttattttttgttcctgaataaagctcgttattagggcctgcatgcgtcataacacttgagcaccctgtcagtgatagcataaacgtcgctagtattaacttgttaatgattatggatctcatagagcacctataaaaagccgttagggttaaacacctttattacatagttaaacctgttttccttgttaggacaagaaaaagaacatctaaggggtttatttttaataacacaggtaattaatttaatctaaaaataaactcattttatataataattctgatgttataaattattatgtttcactgatattaaaattcaaccctattcattttaaataaatattttaactgaatatttatcttttttatttttttgatcgttatatatgctgaatttgtgcaataagacacagcgtttttttatctttttggcaaactagatgtatcgttttagctagtgagttacttggctatttcacttggcataggatctgttttatgagtgatattgcattaacaatggtgatgttgtcattagcaggcgccttaggactttggataggtaacgttaaaatctatcgggtcagtttaggaattggcggagtgctgtttggagggattattgtcggccatttagctcaacgttatggactggtgctcaacacacagatactccattttattcaagaattcggccttatcctctttgtatataccattggtatccaagtcggccccggttttttctcttctttacgtgtatctgggcttaagctcaatgcctttgccattttgattattttacttggttcactagtaacagcctttatttatcacttatttaatgtgccactccccattattcttggcattttttctggtgcggtaacgaacacgccttcattaggtgcagggcaacaaatcctcaccgaccttaatattgatccagccataatcagtcaaatgggaatgggatatgctatggcttaccccatgggaatttgtggcattcttttggtcatgtggtttattcgcgtgctatttaaaatcaatatagagcgagaagcaaaacactttaaccatcagcaaaacagcactaaagagacactgcataccattaacattgccattcgcaatcccaatttagatggcttattaatgcaagatatcccactactcaatgaagatgcccttgtctgttcacgtttgaaacgtggcgacgatattatggttccgatgccttccactattattcagttaggcgatttactgcatattgtcggctcaagagaagatctcaataaggttcgccttattttaggcgaagaagtagatgcttcactttctacctcaacccatcaattacaatctgtgcgcattgttgtcacgaatgacgcagtattgagtaaacgattaaaagatctcgatttaaaaagaaaatatgatgttgttatcacacgattaaatcgagctggaattgaattaattcctagtaataacagtatgctacagtttggcgatattttaaatgttgtgggtagacctggggccatagaagcaattacggtacttttaggtaatgcacgacaaaaattagaacaagtacagatgttgcctgtttttattggcattggtttaggggttttattaggctctatccctatttttattccggggatccctgttgcactaaaattaggtcttgctggcgggccactgatcgtggccttgattttaggccgtattggtactttcgggaaactctattggtttatgcccccaagtgctaatcttgcactacgtgaactcgggatcgtcatgtttttggctgtggttggccttaattccggtggcgggtttattgataccttaatatatggacaagggttaagttggattggctatggtatcgcgatcacactactcccattattgatagtcggtataatggctcgtctcgtttttaagttaaattaccttaccctatgtggcgtacttgcaggctcgatgactgatcctcccgctctagcattcgctaattctattcatcaaaatagcggtgcagccgcactttcttatgccacggtttatcctttagctatgtttttacgtatcatcacgccacaactaatggcactgattatttgggctttgtagcgaatttaatagatatattaaatggttgcagtcaatttgttatcaaatgcttaatttcactttacagaaggataataaagggcttaaaaggggcttatttaagccatcgattttattattatctgttttaatagcgctcgtgctaagaaatttagattgagacggattgctaacttttagtaatcaatttctttccgtcaaacttatgctcaaaagtcctcgttattgtctttgccccttcttctcgctgaaggggcatttttattacttatttattctggcgataagcatcgttctatctcttccgataggatctttattcctttttcaattaatgcaggctctggtacataattcattcgcatacattgatgtgcatgttgccacgactcttctaagcctggaaagaaatagtgaccaggaaccatcaatacaccacgtttttttaaacgccgatagagttcttcacttgagattggtaaatctttaaaccaaagccacaagaaaatagccccttccggtttatggataaggcaacgctctttaggtagatagcgacgaataatatcaatagtttcaagtactcgttgatgataaaaagatctaattatctcttgggataatcgcattaaatcatcacgtttgagcatttctaatgccatcgcagggccaatacctccaggggcaagactaataatgccattcacattcgtgattgcagtaataagctcttcattagcgataataatgccacaacgagcccccggtaatcctagcttagagaggctcatacaaagaatggtgttgtcattccagtggggagttgcttgggaaaaaataatccccggaaagggcacgccgtaagcattatcaataatcagtgggatatcatgttttttcgctaaggcatccagcttttttacttcatcatcagtgatcacattacctgttggatttgttggtctagaaacacaaatagcactaatatcatcacctatcgttaaatgttcaaaatctacatgatatttaaattgtccatcaggtagcatttcaatagtgggtttattcgcaacaaacaaatcttcttctaatccggcatcggcatatccaatatattccggagcgatgggaaaaagaattttgcgctttttaccctcagcagattggccaccgagtaaattaaaaagataaaagaaagcactttgactgccgttagtaagcgcaatatttttagcggaaatattccatcctaatttttcttttaaacaaatagccaaggcgttgagcatcgcatctttaccttgtggcccatcgtaattacatacggcatcacttaatgagccattattcaccatctcttgtaataattggtgaaaatagctgtccatctcaggaatatgggcaggatttcctcctcctaacatcaccgcttctggtgtacgtattccttcatttaagtcttgcatcaagcgagaaatacctgagtggcgagcaaatttttgcccaaatcgtgatagttgagtcatctttgcaggatcttctttgtcgtttttcattagataaacaccataccgtgagccggactcagcatcaaccgttaacagatgtatacttaaatatcaacaccaaccttaaaaccaatattgaaatataaattcagttttaaatccaattaaagataactaaactagtattcttctatttaatactactttccagctgagattgccgacaaaaacaacagagtatatgatcgttaaccatgcctactgcttgcataaatgcataacaggtggtagtaccaacaaatttaaacccttttttctttaacgccttagccatatcatctgaaatttcagtaaaagcaggaacctgtgaaatagtctgccactggttatcaatgggttttccatcaacaaattgccaaataaattcactgaaatcttcaccctgagcttccatcgctaaaaaggcacgcgcattattgataatggcgttaattttgccacgatgacgaataatagacggatcttgtagtagtgtttccacatctttttcagtcattagtgctattttttcaggacgaaaatcaaaaaagcaacgacgaaatcccgctcttttctttaatacggtataccacgacaaacctgcctgttgtccttcaaggcagatcatctcaaaaagtttgtatttatctcgctgtggttttccccattcattatcatggtatgcgagatattcaggatcttgagttacccaatcacaacgttgtttattcatttgctacattccttgttctttataggtgttattcatacaattgatatcgctctttatatactgtataaaaacacatgtaaatagactaagaaaaaatcattctggctatttgagcatagtcataacaacgattaaggcactatttttttgatcaagagaaaattgcccgtattccttgctgtatatctttcgtctagaaggtatactgaaacctttctttttattctatgtatcgccatgcggatataacatgcaaaagtttgataccaaaacctttcaggggctgatcctgacattacaggattattgggctcgtcagggctgtaccattgttcaaccattagatatggaagtaggagcaggtacctcacacccaatgacctgtttacgagcattaggtccagagcctattgcagcggcttatgttcaaccatcacgccgtccaactgacggacgttacggtgaaaaccctaaccgtctacagcactattaccaattccaagttatcatcaagccatcaccggataacatccaagagctttatcttggctctttaagagaattaggattagatcctactatccatgatattcgttttgttgaagataactgggaaaacccaacattaggtgcttggggattaggctgggaagtttggctcaacggcatggaagtgacgcaatttacctatttccaacaagttggcggattagagtgtaaacccgtcactggcgaaattacttacggtttagagcgtctggcaatgtacattcaaggcgttgatagcgtttatgacttagtttggtgtgatggcccactaggtaaaaccacctacggcgatatttatcaccaaaatgaagtggaacaatcaacttataactttgaatatgcagatgttgacttcttattctcttgtttcgaacaatatgaaaaagaagctcgtgagttgttagagttagaaaaacctctgcctttacctgcttacgaacgtatcttaaaagcaggtcacacttttaacttattggatgcacgtaaagcgatttctgttacagagcgtcaacgctatattttacgtatccgtactttaaccaaagccgtcgctgaagcttattatgcttcccgtgaggcgcttggtttccctatgtgtaaaaagtaagaggctattatgacaactgagactttccttgtggaaatcggcacagaagagttaccgccgaaagcgcttcgttctttagccgaatcttttgcgacccattttacggctgaactggataacgccaatattactcatggtgatgtatcttggtttgccgctcctcgtcgtttagccatcaaagtggcgaatatggcgaaatctcaagcagataggatcgttgaaaaacgaggccctgctatagcgcaagcatttgatgctgaaggtaagccaactaaagccgcagaaggttgggctagaggtaacggcatcactgttgaccaagcggaacgtttatcaacggataaaggtgaatggctcttttatcgtgctgaagttaaaggcgaagccgttaaccaactactggctggtatggtaagcaatgcactggcaaaactgcctatccctaaattaatgcgttggggtgataaagaaacgcattttgtgcgtccagtgcatactgttactttattattgggtgataccctcattgacggtgaaatcttaggtgtacaaagcgctcgtattattcgtggccaccgttttatgggtgaagctgaatttactatcgataatgcagaccagtaccctgaaatcctttatgaacgtggtaaggtcattgccgattacgaaaaccgtaaatccatcattcttcatgatgcacgtcttgcggctgaaaaactaggtggtgtcgctgatttaagtgacagcctagttgaagaagtcacttcattagttgaatggcctgtggtgttaacggcaaaatttgaggaaaaattccttgaagttccggctgaagcattggtttacaccatgaaaggcgatcagaaatattttcctgtttacgataaacaaggtgcgctattacctcactttattttcgtttctaacattgaatcctctgatcctcaacagataatcagtggtaacgaaaaagtggttcgccctcgtttagcggatgcggaattcttctttaaaactgaccgaaaacagcgtttagaagataacttaccacgccttgaaactgttcttttccaaaaaaatttaggctctctacgcgacaaaacagaccgtattcaagctctcgccggttttattgctgagaaaatgggtgctgatgtcaataaagcaacacgtgctggtttattatcaaaatgtgacttaatgaccaatatggtgtttgaattcaccgatacccaaggggttatggggatgcattatgctcgccatgatggtgaagatgaagaagttgctgtcgcattaaaagagcaatatcaaccacgttttgcaggtgatgcactaccatctaatccagtagcaagtgctgtcgctatagcagaaaaaatggatacgctggcaggtatctttggtattggtcaacatcctaaaggggataaagatcctttcgctttacgtcgtgctgcccttggtgtgctacgtattattgttgaacaagatttaccattagatattgaagaattaacccaagaagcggctcgcttatatggtgacaaactgacgaaccaaaatgtcgtcagtgatgtcgtagagtttatgctaggtcgtttccgtgcttggtatcaagagctgggttatagtattgatactattcaagcggtattagcgcgccgcccaacacaacctgctgactttaacgctcgtgtaaaagccgttacttacttccgaaccttagaagaagcagctgcattagccgaagccaataaacgtgtttctaatatcttagcaaaatcagcagatgttaagctcaacgataaagtattagcctcggtgctaaaagcgcctgaagaagttcagctagcggctaatctttctgtgctacaagataagctagcccctctatttgctgaacgtaaataccaagaagcattagttgaactcgcctctttacgtgatgttgtgaataacttctttgataaagtgatggtaatggataaagacgaagaaattcgtgtcaaccgtttaaccatgctacatgaattacgcgagttgttcttaaaagtcgctgatatttctgttttacaataagttataaaacttagtcatacaacaacataaaaccggcattgcgaaagcagtgctggtttttttacttaaaataaaaataaaaaacgattaaaaaatacccatttacattctatgattgagtgataaaatttactatagtaaaaactaccacagaggacgtgatggttatttataaaacaaagatgttcaaaaatagtttcaaaaaaataacgcttacgaatgcagaactaatagctatcgctaccgaagtccttgcaggacaatttgaggcagatctaggtggtggtgttatcaagaaacgtgcctgtatccaaggaaaaggtaaaagtagcggaattagaacaattatattttataagcaagggaataatttattctttgctgatggttggaaaaaatcgagtttaagctctaaaaaaaccaaagagatcacagatgatgaacttgagtcctataaagatctagcaaaagatctcttcaatgcaaatcaaaataaaatagataaaatgattgcactaggccttttaacagaggttaaatatgactgataaaatgaaagaaatgctaaaatttgcacaagaaatggaagatgcaggagtcactgatggcagtacaactaaacgtattgccgccagaataaaagcgaaagaattacaagctaagtataaacatcctacccctatgacaggtgaagatataaaaaggatccgtgagcaaaataatatctctcaatcttcccttgctttgatattgaatatgactaaagaaagcgtttctaagtgggaaagaaacgaaattaagcccaatggtgcagcactacgacttctgcatttaatagataaaaaaatattattcatctagtttcctcaaaagaataaaaaccgacattgcgaaagcagtgccggttttttattggtgattaatcaatttattataaatagtatgatgagtaagctcgatgatcctgatagactcattatcaataatattaacaataatatgtaataaattttcaatatcttctgcgtgaaaagattctatttccgtttctatctcaataggaaagccatttattttactaaagctataaccaaatagtataaaaccaccctctttacttaaatcagcattattaatataaacaaggcgctcactatttataaaatgaatattacttttattattatcttcaaatgataccttaactttattattggtgatcacttctagctttttgaccactgcactgattttatcttctatcttacttcgtagatcaataataaaagatgctctattgagtgaagcttttattttttcgaatatcttatgttcatcattcatggaagatcctacaaaatatggggtaatgatcaaatttcttaaaaaagatatcatcaaggcagtgattatcatcatttaggacgcgataaaaatcaagctgttcaagatctaatttaaaacaatcttcttttccatataaaaatgatgaagaaaaaatcatttgatcaaacacataccaacgattaatagatgcggaattataataatatgtacctaaattattagtcttcttatcagataagagataccaaaatgggttaaataatagttttcttttcttttttattaaatgataatctcttgtcgcatacaatatattaagcatcgcattagaataaggctctgtattataatcccccatacaaataaactgaacatcatctccattattttcaaagagtttattaatactacttcttaatcctgcagctgccacttctcgagttgtatcattagcacttaatattgatggccaatgtgataaaaaaagggtgattattttttgatgttcgatttctttaaatacaacagcaacgcctacccttaccattctattatcaggctggagtttagttaaaaacttacttgaaataaactctagtttattcatttgatatattaatgatatatcaataataatccggcctatttttcctgagagatcgatataccccatttttaattgagttgccaactgcttaaaagcgtagctctcgttttcagaaacctcactcaacgcaatgatatcaagtgtttttttaatgataagttcttcaagatattttttcgctaagccaactttttcagtcttgacgttctgttttgattttgtcggtggagatattcctatattccaccagcataaatttaattccattgttatattttatatccattaaaatatatttaatttttaatctctaataactattattaaaacaataagttaactttaacatgacaattagctttataaaaaccaataaaatgaatcaagacaaataaatattttaatttttatttaaataatatgtatattaataataatagaaaaggtaacatcaaaatcagttacctttcacaataaaaaacgttataacccactttctaccgtaaatatttgccgataaccatcaatatcacgcataaaagcaatatactgatcattaggtgaaaatacgactgcgtcaccacttggtgcttgtgctgttttatcagttaatcgcgttaattcacctgttttagcattacataacatcacgctattatcacaaataaaggtgagatattctccgctatagctccaagtgaatgcagattgaatatcccattgctgtgaagtgacctgtctaatcgctttggtggctggcgaaacggtatatagctggacaacaccattatcatctttcatcagaaaagcaatcgcatctccttgcggtgaacttcttaaccaatgacgaggttgatttaaaacaccgggatattttctatggtgggtattcgtcaagcggatttgttcaatcccttgtgcaggagctggcatcgtcgtctctgttcctgccagaggtttatcaccttctagactgaaagcatgatcatcatctggcaaatcaactaagaagatatcagcgaccttctcaccactttcactgaccgtatcaccaataaaagcaatagcccaacgctgttgtgagccatcagctttggtataaccttgtttacctatccaacactcttcataggctttattaatttcatcactgcccttttgtggataagcgactgtttggcttattagggtacagaaatattcaccgtcatactcacgggggtgctttttcgcaactttaacggctttgagtggcactgcgattgcaacattacgttgatcgaactcgcgccctaactcatgcattatgtgatcattataagtaaagcttaaacgtgtaccatcagggctaaacacatgcacatgggttccaccacgtaacgcgccagcttgataaggcaatgtcagggaacaagcatcgatattaactgcaccaagatcttcctgctcattaacaatcacaccgcgacggtgatgaaaatcataatgccataaatcatcgggattttctgggccatgaataaaagcataacgcaccggtgccacagggctgactgtggcaaccccaacatgagcaccttgagtggcggtgtaaattatctgttgctgttttgttttcgcatgaattttttctatggttaatcctgtaaaagatccaccattgggacgtacatcataaactaaccactggctatctggtgtccaaacatttatattggttaactgatgatgacgactatcaaatgtaatctgttgttcctgaaaagacatagttatccttatcgggaaataaatttccacattataaaaactaattgattttacctggcactaaaaaaactcagtcgagactttttcgcaaggtgattactctaccctcactaaacagtcaaaaaattaaaaaatcatgttacttagtgttctttatattattggtattaccgcagaagccatgacaggggcacttgccgctggtcgccgtaaaatggatgtttttggcgttatcatcattgcatcagccactgctattggtggtggttcagtaagagatattcttcttggtcactaccctttaggttgggtcaaacaccctgagtatattgtcacagtagcttgtgcagcggtgatcactatttgggtcgcccccatgatgaaacacctacgacgcttatttctcattttagactccatcggattgatggttttttctattatcggtgcccaaattgcactcgatatggaatatggtcctattattgctgccattgcagccgtgatcaccggcgcttttggtggcgttttacgtgatatgctgtgtaataccattcccctcgtcttccaaaaagagatctatgcgggtgtcgcatttggcgccgcttggctctatatgggattactgttttacacgccactccctaaagatgtcgtgattattattacgcttgttgccggactcacggctcggctactcgctatccgctataagcttggcttacccgtatttaattatgaaaatcaagattagcgaaacggagtaataacaacagcaattattgtagattctgtggggtatctcaaagtatcatctatttctcgatgatgataaaaggcaattcctatcactgagacgttatttgtatgttaatattgggcttactcaatttttctcttatttcaaaacaaaaaaatagctgaattaagaaaaaaatagccctgtattaaacaagggcactgtatgtgcttcgaggtatgtgtatactatagggggatttgctccctagacatacatttatattaattctccagtcaaattcagaaagtcatcatgatccaaggaacactttatattgtttccgctccaagcggtgcgggtaaatcaagtcttattcaggctttattaaaaacacagcctttatatgacacacaggtttctgtctctcatactacccgcccaatgagaccaggagaaaaccatggtgagcattacttctttgtcactgaagaagaatttaaaagtatgatagcaagtggagattttatcgaacacgcttgtgtgtttggtaactattacggtacatcgggtaaagttatcaaacagatcttagccagtggcgttgatgtctttttagatatcgattggcaaggtgcgcagcaggtacgtaaaaagatgcctgaagctcgcagtatttttattctgccaccgtctaaagaagagctttaccgccgacttcgcggacgtgggcaagatagtgaagaagtgattgctaaacgtatgtcacaagctgtgtctgagatggaacattttaatgagtatgactatttgctcatcaatgatgatttcaatactgcgcttgctgatttacaatcaatcattcgctcagaaaaattacgccttgatcgtcaaacactacgacatggtgatttaatcagcaaattattggcagactgagataagtttcagtattatgcccagtcatttcgttaatggtggagtaacacaaatatggcacgcgtaaccgttcaagacgctgtagagaaaattggtaaccgttttgacctcgttctggtcgcagcacgtcgtgcgcgccagttacaagttggcgctaaagatcctttagtaccagaagaaaatgataaaatgacggttatcgcactacgcgaaatcgaagaaggtttgattaacggtaaaattcttgatgctcgtgaacgtcaagagcagcaagagcaagaagccgcagaattacaagcggtttcagcgattgcggaaggtcgtcgttaatcgtctcataaaataggggtaggtctgccttgtacctgtttgaaagcctgaatcaaatcgttcaaaaatacttgccacctgagcaagttgaacaactcaaaaaagcctttatcgtcgccagagatgcccacgaggggcagactcgttcaagtggtgagccttatattactcaccctgtggcggttgcctgtattcttgccgatatgcgattagatcatcaaacgctaatggcggcattgttgcatgatgtcattgaagatacacctgcgacatttaaagatatcgaaactctgtttggcagtacggtggcagatctggttgaaggcgtctcaaaactggataaattaaagtttcgagataaaaaagaggcccaggctgaaaactttcgcaaaatgatcatggcgatggtaaaagacattcgcgttattttgatcaaattggcagaccgaactcacaatatgcgcacgctgggttcactacgcccagataaacgtcgccgtattgcacgtgaaacgctggaaatttatagtcctcttgctcaccgtttaggtatacaccatattaaaactgagctagaagaattaggctttgaggcactacatcctaatcgctaccgcgtgattaaagaagttgttaaggcagctcgtggtaaccgtaaagagatgattaataaaatcctctctgaaattgaagggcgccttacagaagcgagtattcaatgcaaagttaacggtcgcgaaaaacacctttattccatttatcgtaaaatgttgctaaaagagcaacgttttcactcaattatggatatttatgcctttcgcgtcatcgttaaagatgtcgatacctgctatcgcgtgttaggccaaatgcatagcctttataaacctcgccctggccgcgttaaagactatattgctatccccaaagctaatggttatcaatcccttcacacttcgctcattggtcctcatggtgtccctgttgaagtacaaattcgtaccgaagatatggatcaaatggctgaaatgggcgttgcggcccattgggcttataaagagcaaggtgagcagccggggacaacagcccaagtcagagcacaacgttggatgcaaagtttacttgaattgcaacaaagtgcaggtagctcttttgaatttatcgaaaacgtgaaatcagacctttttcctgatgaaatttacgttttcaccccagaaggtcgcattgttgaattaccaacgggtgcgactccggttgattttgcttacgcagttcatactgatattggtcatgcttgtgtcggtgcaagggttgatagacaaccttatccactctcacagtctttacgtaccggacagaccgttgaaatcattactgcgccgggtgcaagaccaaatgcggcttggttaaactttgtcgtcagttcaagagcccgttcaaagataagacagttgctcaaaaatctaaaacgtgaagactctattaatttaggtcgtcgtctacttaatcacgctttaggccatcataaagtggcagatattccgctagaaaatattgaacgagagttgaagcgcatgaagcttcactcaatggacgatattatggctgagataggtttaggtaatgcgatgagtgttgttgtggcgcgtaacttattgattgacaaccaacaacaagaagaacacacacatctaagcataaccaatgacgaaacacctaaattacctattaaaggggctgatggtgtacttatctcatttgctaaatgttgtcgccctattcctggtgatcctattgttgcgcacattagccctggtaaaggcttagttattcaccacgaatcttgtcgtaatattcgcggttatcaaaaagagccagaaaaattcatgccagttgagtgggataaagatattgatggtgattttattaccgaaatcaaagtcgatatgataaaccatcaaggtgcattagcgaatttaaccgcagcaattaatgacgctaattcaagcattcagagcatgaataccgaagagaaagatggacgcgtctattgtgcatttattcgactgacagccaaagatcgcatccaattagccaatattatgcgtaaacttcgtatcatgcctgatgtattacgtgtcagccgtaataaaaactaattatgaatccaacacgctatgcccgcatctgccaaatgatggcgatgcggcaacctgatctcactgtttgccttgaagaagtgcataaatctcataatgttgctgctgtaatacgcactgcggacgcggtggggatccctaaaatccatgctatctggcctgaagaaaaaatgcgtatgctggtttctcccgcagcgggcagtaatagctgggtaaatgttaacactcatccaaccattgccgacgccatcaacacttttcgtgcacagggcatgcaagttcttgcgacccatctctcagataaagcggttgattttcgtgagattgattacacacaaccaacctgtattattatggggcaagaaaaaaccggtatatcaccagaagctattgcgctggcggatcaagatatcattgtaccgatgatgggtatggtgcaatctttgaatgtttctgtggcgagtgcattaattttatatgaagcacaacgccaacgtcaggcggcgggcatgtataatcgaaccgaaagtgcattaactgcagaagagcaacaaattttactctttgaaggtggctatccagtacttgctgaagtttctcgtcgtaaaggactgcctcgcccttatattaatgatcgtggtgaaattgaagcaccggactcatggtgggcagaaatgcaaatgacacaaaaacaacttaggaaatttaaactgacggagtaactttcccatgaaaggaaaactgcttgatgcaatccccttaaccactcttcacggcgtaggtgcaagtcaggcagataaactggccaaaatagggttagtcactgtggaagacttattgcttcatcttcctttacgctatgaagatcaaacccatctgtatgccatcagcgatctacttcctggtattccagccactgtttccggtgaaatcttaagaactgaagtaaattttggtcgtcgaaaaatgatgacctgccaaatttctgatggttcaggtattttaaccttacgcttctttaacttcacggcagccatgaaaaataaccttgctcagggtaagcaagttatcgcttatggtgaaataaaacgaggaagtcgaggccctgaaattattcaccccgaatacaaaattaaagtggctggctcagaagttaagttacaagaaacgcttacccctatttattcaacaacagaaggcttacgccagacatcgttgcgtaaattaatagaacaagccttaaccttacttgatacttgtgccattaatgaactgcttcctgatcaatttatttatggtttaccgccactcgctaccgcgttacgaaccttacataatcctccccctgatattgcgtttgctgaacttgaaaaggggcaacatcctgcacaaaaacggctgattattgaagaattattggcgcataacttaggtatgcttaatgctcgggcaggagcacaatcttatcgtgcagaacccttattaatgccacatggctcaacattacgtgaacaatttcttgcaacattgccctttacacccaccacagcacaacagcgcgtcgtcaatgaaatagaacaagatctagaaaaaaattatcctatgatgcgcctaattcaaggagatgttggctcaggtaaaaccttagttgctgcactaagtgcattaagagcgatagccaatggtaaacaagtggctttaatggcgcccactgagttactagcggagcaacatgccctcacctttagaaaatggtttgagccttttggtattcaagtggggtggttggctggcaaacaaaaaggtaaagcgcgagaagcacaacaaaatgcaatagctaatggcgaggtttccatcattattggcactcacgccatttttcaagagcaagttaagtttcactctctcgcattagtcattatcgatgagcaacatcgctttggagtacatcaacgccttgcattatggaaaaaaggcgaagagcaaggctttcatccacaccaattggtgatgaccgcaacccccattcctcgaacactggcgatgaccgcttacgcggatatggatacctccattatcgatgagctacctcctggtagaaccccagtaacgacagtggctatccctgacactcggcgaaatgacatcattgaacgtatcagggtggcttgtagcgaagaaaatcgccaagcctattgggtttgtacgttaattgaagactccgaagtccttgaagcacaagcagcacaagttatttatgatgagctgacgattgccttaccggaaatcaagattggattggttcatggtcgaatgaagccggcagaaaaacaggcggtgatggccgactttaaagaaaacaaactacagcttttggtcgcaacgaccgtgatagaagtcggggtagatgtacctaatgccagtttaatgatcattgataaccctgaacgattaggtcttgcacaattacatcagctacgagggcgtgttggtcgaggtgctgtggcttcccattgtgtcttattatataaaacgccgttaactcaaactgctcgtttacgtttacaagtgctcagagacagtaatgatggctttgttattgcacaaaaagatctcgagataagaggaccaggtgaactattaggaactaagcagacgggcaatgcacaatttaaagtcgcagacttattacgcgatcaggcgcttattccagaagtacaacgtatcgctcgttatttacatcaacattatcctaagcattcgcaagcgttaatcgaacgctggctacctgcaaagacccaatatagccaagcttaaacgacaccgtttaaatggcttagagcacacttgagggcttaatactgtaataaaaaacggcacagacttacctgtgccgttctcattcgaactagatgaacactgtcatcaccctgctataggcgtaaagaatggtagcatcagatacaatttgatcactatcgcattcactatatcaataaagaatgcaccgaccatcggaacaactaagaatgcaagatgagaaggaccaaaacgatctgtcacagcttgcatattagcgatagccgttggcgtagcgcctaaaccgaaaccacagtgacccgctgccaaaattgccgcatcataatttttacccataacacgaaaagtgacaaaaattgcatacaatgccattactgccgcttgaacaccgagaataaccaacataggtattgccagtgatgccagctcccataattttaagctcatcagcgccatcgctaaaaataacgataagctaacgttacctaaaacagaaacggctctatcaaatacacgataaaaaccgagcattgatagactattacttaaaataacgccaatgaacagtacacacacaaaggtaggtaatgagaaagccgtaccttctagtaactgagataagaaagtccctgccattaaacagatagagatcatcgcaatggtttccaataacaccattgaagtgatcattctccccgtagcgggtttctcaaaggctgtaggcatttcatgatcatcactgcctgcgccaggggttggaatgttacgaattaaataacgcgcaacagggccaccaattaatccacctaacactaaaccaaaggttgcacaagccatagccacttcagaggcactcataaagccgtagctttcaacgaatgttttcccccaagcggcacccgttccatgaccacctgataaggtgatagaaccggctaataatcccataagaggatcaaggcctagcatttctgctaatgcaatacctactgtgttttgaactaaaagtaatccaacgaccacaaacacaaaaataaatagcgcttttcctcccgcttttaagctggcaaggttcgcgtttaaaccaattgttgcaaaaaaagcgagcatcagtggatcttttaaggagagatcaaagctaatttcccagtccataaatgattttaatgcaagtaaaagagctgcaacaagtaacccacctgcaacgggttctgggatcgtataccgttctaaaaaaggaacagatttcactaacttacgtccgagtaaaagaaccaaagtggccgcgactagcgtgccataaacatcgagatgatacatttatgtaccccgtcttatttgttaattttgtataaaaaaactacgacgctaagttcatccatgaacaacgccaaaagcaggtataccccgattagaaaaaaaaacgacgataaacacaagttaaaacatataaaaatgtgagcgcctcttatgcattttgataacatcaattttacgcaaacgattgcttttgtggcgcagatcattaaaatacgctttttgccagataagaaattcacatcatggttacttcagaaaatcgtaatttgtcacaaagtagtcagatttcgccccaaaaaacgagtgaacttttattcgctttagaagaaaagcccccattactacaaacactatttgcggcttgtcagcatctattagccatgtttgtcgccgtaataacccctgctatcttaatttgccaagcattagggttacctgcacatgacactcaacgcattatcagcatgtcattattcgcctcaggtattgcatcactgatccaaattcgagcttggggtcccgtaggttcaggtttattatcaattcaaggcaccagttttaattttgtggctcctctgattatgggggggttggcattaaaaaatggtggcgcggatattccaacaatgatggcggctctatttggcactttaatggttgcttcacttaccgaagtgctattatcgcgttttttacatttagctcgccggattatcacaccattggtatcaggaattgtggtgatgattatcggcctttctttaattcaagttgggcttacttctattggtggtggttacgccgctattgaaagtaacacctttggctcacctaaaaaccttttattagcgggttcggtattagtggttattattttacttaaccgccaaagaaacccttatttacgtgtcgcttctttagtgattgctatggctgtcggttatattttggcatggtggctagatatgctacctacaccgcctgaacaacaagaaacaccgattatcaccgtaccagaacctttctattatggcctctcatttgattggcatttacttatcccactaatgctggtgtttatgatcacctcattagaaaccattggtgatattactgccacctcagatgtttcagaacaacccgtcagtgggccactttatatgaaacgcattaaagggggcgtattagcaaatggattgaactctatggtttctgcgttttttaatacctttccaaactcctgttttgggcaaaataacggcgttattcaattaacaggtgtggcaagtcgctatgtgggctatgtcgtagcagccatgttgattattttagggttatttccctctgtggcagaatttgtacaacgaattcctgaacctgtactgggaggggcaacgcttgttatgtttggtactatcgctgcatctggggtgcgtatcgtctctaaagaggcgctaaatcgtcgtgctattatgatcctcgccatctctttggccgtaggacttggggtatcacagcaacctcaaatattacagtttgcaccagattggctaaaaacattactgtcatccggtattgctgcaggcggtctaaccgctattattttaaacctgatttttccacccgaaaaataatcattaataaacttccaaataataaagcgctattttcataatcaaaaatagcgctttatttgttggtctttttataaaagcattgtcctttaagttacggtagatatttatctaattacttaaaaacaaaggagaatacaatgttgaccccaactaaaaactctgcactcgaatacttaaaaagtcatccatctactaaagaatttcatatagaaactattgggcaattttttacttatctcaaagattctattctttcattgtttaatagtgatcataaatttagctatttaggaaagatgtctgttgcagatttcaacttaatgtatattagaaaagatttgcatacttttttaactaatccatttctcaataaatcggaacataaagacaaagtaggcgctcttcagtactcatttgattacttgcagaatcaagcccatattacacctaacctttacaatgtttatcgctctggaaattttgagcctaacgaattgatttcacaattaattaattacggcaataagcttatcaaaaataatttaagcaccgaagaagcacaacatggtaaatatgttatagaaacattaaaagaggtattgaataatttagaaaaattatccaatacagaaaaaatgagactcagaatattaagtatcgttaatgaacggaagtaatctctttgatttacccgatgaatacttgagcatcaactcgttttcaggcataactgtatgatgttttgatggagtataaaacaggagaaaggttatgcgctggctgataaaaagtttggtatctctgatacttatcgttattttatttattattgtgatttatgcctttcttcagacacaatggggtgcgcaaaaaactagtgaatggttaacacagtatagtgattatgacattcgcttttccggtattgaacatgatttaactcaaccagaacaaattgttgtttatgatctgtccattaaccccaaacaagataaaaccgccgtattagcccaatcagcacaacttagatttaactggcaattttttactacggcgtctcatctgcaaaaaattactttagagaatggtaaaattattttagctaataaaatagctccccttcctgttagtgcagatattctccagtttaaaaatatgcagttagatagcatgccaacatctagcacaacattcacctttagcgctaacaaaataacgggaggtatcacaccttggaaacctacctcgaccgatcctattggtgcggggcattttcagttttccattgctgatggcatgataggaaaaaatagctttaataattttattgttgctggcgaatatcaaccaaatcgtattttgattgaaaaattagccacccagttccttaatggctcactctctttatcaggccaatatcaagataaccaatggcaacttaatgatgtttacttaaccggactgcgttggcaatccacaaaaaccttagaagagttacaacaatcattaagtcaatctccagcaatgactatcaagcaattgaacattgttgattttactgccgaagggaaacagtgggcaataagtggatttgctgggcagttttctcaaattgcgtggaataatagcctatcactgacatccggtgagctaaacaccgatgatattgtgtataaaaatcaacatgtcactgatgtgatcgctaagttaaatcagcaagataatttatttaacatagataatttaagcttacgctatgaaaaagggctaataaaactagcaggacaatggaacagcgagacaaagactttaaatattgaagatgcaacactctcaggtattttatataccctacctgagcaatggctctccttctttgctaaacctattgagcaagatgtgaagagtatcaatattaagcagctatcattaaaccaatctatcctcattgatattaatcccctctttccttttcaatttaccggcctaacaggccaactgaaaaatttaatcatcgccaaagatgggcaatggggattatggcaaggcgccgcgacgttaagtgctgatagtggcacattaaatggcgtagagcttcgccgccctgacctaacattaatgacacaacaagatactgccattatcccacagttttctgctttcgtagataaaggcatcgtgcgtggctctgctgcattagaacaaaacaataaccaaagactattttctcttatcgtcaatgggctgaatgtgcccctctctttgcctaataatatgggctggaaattatcgcaacctaccgatggaacaggacaatttaccttaaagcttaaaggcaacttagccgctgacgctgttataccgaccttaaatggtacattaataggtaaaaaagatgaccaaacgcctatcgatgacaggatgcaagacggcgaaataataaataatttatccttttgatggtttagcaggcgcatagattgcgcctgctgcaaaaagcgttacaatgcagactctttctattttcttattgcggagttttcatgtctgatgacaatttttccctgccaacaatcactcttgatgaatttcagcaagcacccttaaccgcacttgaaaatagtagtagtgtcgaagtgtgtgataataaccaaactccgttattttattgcctatcaaaacaggattatgacacgctaatggggcgtattatggatgcagaattagccgccattgtacttgaacgtcgccaaaagaaactcgatgaactggatttagagtgattgattgcagtgaggaataaagcgggataagcgctaatttctcccgctataggcgcttatttaactcagaatgacaaaagaaacaaactaacgttttttctttttacgccccggttgtgcaaagcgtttacgcgtattattttccgtctctttggcttttgttttcggaatatggatccctaacgctttcgcattactacttatctgtttcttaggtttattttgcttctgtttaggggcttcagagcttgatgcttcaatagcatcaaatagctttatcagctcatcatccgttaaatcacgccattccccgacaggtaatcccgccaaactaacattcataatacggatacgttcaagcttggtgacttcataaccaaaatattcacacatacgacgaatttgacggtttagaccttgtactaaggtgatacgaaataccattgcggcttcttttttcaccttacatttcttggttttttgtcccagaataggaacacccgcccccataccgcgaataaattcatcagtaatgggtttatcaaccgtgaccaaatactctttttcatgggagttacccgcccgtaagattttattgaccagatcaccatggttagtcaaaaaaatcagtccctgagaatctttatctaaacgaccaattgggaaaacacgggtgctatggttaacataatcaacaatattatctttctcaccttcatctgtggtactgacgatacctacaggtttattcagtgcgatcaacaccagctcagaattatcttgcgcttcaattaatcgtccattcactttcacttcatcgccagccgttacgcgatcgccaatgcctgcgcgcttaccattgataagaaccagaccttgctcgatataacggtcggcttcacgacgtgaacagataccgctttcactgatatatttattaagacgagtagataaattggtgtccatgcttccctccgtaaactgcggaatatacctcaattaagtgacgatagaaacactattaggtagacactaaagcagagatttctcactccccatttccatgataagaaaaaggtagaaaaaaagagagataaaaacaataaataacttaattttcaattaaatagagatttattatttagcactgtttattttgtgagggtaacacaatgtaagtgccgctaaaaaccgcccccgttccttcatcaccacaaatatcaacatctaacttaatacgtgctttgcttcctttcgctaatcgtcctaaatcaccacttaaattttccatatcagcaacggctgacggccgaccagagactggtttacgataacgaatatgcgcatccaccagcacaatatcgccttgcagtttatgctcttgcattaacaaccaaatcagcccccaaccggtcagtgttgctaaagaaaactggctaccggcaaaaatagtatggtgtgggttttgattaccggattcagggatcgtggtataaaaacgggtgcccgtatattgcgtaatacgtaaccccattttttcacttagggggatatgctgatgccactgtttttgtaactccgcacaccaatcaggacgatggagaatatcatctaatgattcaatactttttttcataaagtaatgtttgatcggggtagtttgaggacctgtgactaaaccacaattctcataacctaatttttcaaagaaacgaacggactcttctctggcgctacaaacaatacgctttaccccttcttgacgagctaaagactctaacgccatggcaactaaagagcctaatcctttaccttgagcatcctcacgtaccgccataaagcggattgcaccttcattatcggcatttatatagagacgaccaatagcaacgggttgcccactgtcatcaaccaccatctggtgatgcgctaaggtatcataaccatctttttcggagccttcgggctgatgtaacggtttacgaagcatttcccaacgaaaagtataataagctgctaattctgcttgcgtcttaggggttcgtaaatgatacatagtaagctcctattataattcaactagacctgcaaccagaatgtcactgggccatcattagtcagggtgacctgcatatcggcggcaaattgccctgtttgggtttctaaaccttgttgcttacactgctcaacaaaatagtgatataaattttcagccatttcaggaggcgctccgttagaaaaacccggtctcatccctttttgggtttcggcagccagtgtaaattgcgatacgactaataggctaccacctgcttgttgtacattcagattcattttgtcattttcatcactgaaaatacgataaccacacactttttcacacaatctttttgctttctgttggttatcgtctttttctactcctaatagcacgagtaagccgtgattaatggcaccaacagtcacaccggcaatatcgactttcgcttgtgtcactctttggattaacgcaatcatactgtattcctgattaacaccgaatatgtgtttataaaaaaaggataacaaattcaattaattgttatcctattacaacgttattctgttactgggagagtaaaatcatgatctttaaagtattcaacaaccgtatttttatctacgacatgaacaccttgaatacctaacgcaatggctgcatcgacattagtttgtaaatcgtcaaagaagacagcatcttgtgcttcaacgccttcggactgtagcacatatttatacacttcaggatctggctttctcataccgatatcttgggataaatagagaaaatccgctgaagcggcgatttcaggatagtgctgaggccaataatcttgatgtaatcgattagtatttgacaataccaccacacgatgaccttgctctcttagcttattcattatatctatgacttctgggcgaacagcgataaaaatagcctgccatccttccgcaaactgttcaaaactcagtccaataccaagctcagcacagacagcttctgcaaattctatatccgtaatattgcctcgttcgtgtaatttaaaggtttccccagtcgtaaaattatcttttatactggctaatggaaccccactgagtttactccacacggcaaaaacacgattgaaatcaatatcgataatcacattacccatatcaaagatataaagcataaattctctccataatagaaaactcgttttactttaatcataaattgcttgagtgaataggcttaaacgataaaaaataccatattcacacctaattttttgaaaaacataaaaccagaaggggaagagacgaaaaataagacgagaagcatccttatctataaaggaattgccatgtgatgataaggtactctctccccatttattttcctatgattttaaaatcatcatgcaactgtgcccaatgtaatactaatttctctttatgctcatcaagcatttaaaatgccatgtagctgaatattaaggccttccactttctcgatttgtttattcataccttattcctctgttttaaaccaaaagtcgagatcatccccatcatctttcaaatcaatttcgcttttattcgctatcacagtacttgcaatcatagggtttatattagaatttttagccttaattgataactctaaatctagtccttctaatactcttaataaggttgatagttttaaatcacttcctgattctatacgttggtattgttgctgtttcataccgatacgtagatacatatctttttgctcaatacctaattttttacgttgttccgctattaaattagcaatttcattaatagtcttcataattaactctaaaccatttcagtgattacattagcattatatacaacattttagttgtatataaacaaaaaacaacttataaattgtatacagcaataaaaacaactttcaagttgtatataagacaagaaacaacacttgagttgtaaatggaaatcaaggaatgaaaaataacaaaagctagcattataggtatatcagcgcattatccgaactcacttattcatgctaatgcacaaccatatgaagatattactattagatatgaaagtatatcttgggatcacatttgtgcaggaatgtcaggtgatagtattagtcaaaacatttaagatttctcaacaaaaagtgatgtggttcttgatttttcatcaatagatatttttatatgtatattatctttaacccatcgctcttctttatagaaatcatcatatgtagaggtgaatccatttttagatagattatcaataagagctatgttcttttcaggttttatattaaaaaaaataacatcattggactcatttgaatttccatctatgggtctatagataatgatatattcatctgatataaaatctatttttttgacctcatcaaaagtgtataggtaataataaacgaaatttaacttggtatattctctgtcaccaggaaacatcagtaaaatgatggtcgtcattaaagataaaatcaataatattggaaaaataaaaaatttattcaattttaatccattcactttcagctccaatgtttattcctgttgtatcttttacatgaattaaaatactattatttctaatatcttctatcggttttacgcgatccaaatagcatggtaatgaaacgaagtaaggtcttgcattatttggataaatagcaggatcaggaaaaattaacggtttgaaaagcttatttttatatttactaatagagccgtaataatcccagcgacgataagcctcttctttacttaatactgttaaatatgtcattgggtctacgtcactaacatagtctcctgcagttagaacacccattaaagtggatgcatcttcaccttttgcatgacttttatctatccatccaatttattttgtgtagataagtctgcctccatcaatatctgatctttttgtcattatcacacatcttttgttattacattttagttttagataagaccgtattatgttaaaaaagccagtaaattactggctttttagtgttataaaaataaaaacggcaacgcatcccaaaaatatcaaacatgagtccagtcctctatttttagtccttcaactcgtgaaaattcacgggtattatttgttaccaatattgcattaaccgcgacagcatgaccagcaatcgcgctatcattatttcctatgggcaatcccacatcagataagcatttttttatcacggtagttgcgtctaccgccgctttatcccatgccaaaatcgcgtcaacgcgttcacagaaagcatcaaccaaacgattgtgtttaggtgatgctttttttcctattgctccaaagcgcatctctgaataagtaatcgctgatatgacaatagtatcgtggttcattacacatttctgaagtttttcgagcaaagaaataggttgctctcgcatgataaaagaacaaatgtttgtatcaagcatatagacttttttcacagaataactcgtccttcttcaataacatcatcgcgttcaagcaagaaatcactgtcggctttttcttcgttttgtaatgaaatccagttaggttttacagggcgtaaaataatacaatccccatctcggcttatctcgagttcattgacaccatcaaaatcgaaatctttaggtaagcgaatggctcggttacttccgtttttaaatacagctacagttctcgttctcatatcagatacctcttacgttagcatatgccaaatatatgccttcgtgtgacatatgtcaacatatgcatgggtatgtaagacccgagtaccctatcaaacacccaaaaccatactgaaagtttagaacggtttctgtgctgttcaatggcatttttaacatttcttttttaaacctaaaaatacggttaacgtttttaaaagtagccaatgatttatgagatatcggatgaaagcgaaaaaagtaaaacccgagactgagatgcacaaatggaaaaggttcaaccaaatgataaaaggaaaaatcggtttagtccggcgcaaatagaacaatggaaaaaggagcaagaagcccaaaagcaatgagaagcatgactgactgaaagtaaagaggcaataaaacgtcacatgaaagacttatagcatttagcataaaaacctaatgcctcaatgtggtactaatcaaaacagagcgaagcgacaacatcttcttgtctttgcttttctccatgatcggttattgtgccttagctcgtgcaactagctaagttgggtacttctggttaggttgggcttctttcgatggtgcaatcgaaaaatctctagtccgttgattggtgctcttatcaggtacgcactgtaatctttcgataccgcaagggtagagctaggatcacttcacagaagtgacggggttttataaactcagggcgcttaacgcgccctaagaattatattatcagaataacaaattagtctttgctacgataagcacgacgacgatcgttttctgagagatgacgtttacgtaaacgaatagattgtggagtcacttccactaattcatcatcatcaataaactctaatgcttgttctaatgtttgcttgatatgtggcgtcagcgttgtcgcttcatccgtaccagaagcacgcatatttgtcagttttttacctgttaagcagtttactgttaagtcattagagcgagtatgaataccaataacttggccttcataaacttctgcaccatgagtaacaaataacttaccacgatcttgtaagctatatagcgcgtaagcaacggctttaccctgaccattagagatcatcacaccattattacgacgaccgatttcacctgggcgcacatcgtcataatgactgaatgttgcgtacagtaaaccagtacctgatgtcatcgtcataaactcagtacggaagccaattaaaccacggctagggataatgtagtctaaacgtacacgtcctttaccatctggttgcatgtcgcgcatttcacctttacgctcacccatcgcttgcatcacatcaccttggtgctgctcttcaatatcgatagtgacttgttcgaaaggctcttgtttacgaccatcaatctcgcggaagataactttcggacgagatacggctaattcgtaaccttcacggcgcatattttcaatcagtactgataggtgtaattcaccacgacctgatacacggaatgcatctggatcttcagtctcttcaacacgcagtgctacgttatgaactaactcttttttcagacgatctaaaatctgacgagaagtaacaaacttaccttcacgaccacagaatggtgatgtattaacacagaaatacatgctaacagtaggctcatcaacggctaatgcaggtaatgcttccacagcacctacttcgcaaatcgtatcagaaatatttaattcacctaaacctgtaatcgcaatgatgtcgccagcttctgcaacgtcaacatcgatacgctctaagcctaaatgacctaatactttacctactttaccgttgcgggtattaccttcgctatcgatgatagtcacttgttgattaggttttactttaccgcgcttaatacggccaataccgataacacccagatagttattataatctaactgagaaatctgcatctggaaggtcccctccagatcgacttttggcggctctacatatttgacgatagcttcatataatggagtcatatcatcagccatgtcattataatctgttcccgcaataccatttaatgctgatgcatagataattgggaaatccagttgttcgtcagtcgcacctaagttaacaaacagatcaaagacctgatcaacaacccaatcagggcgtgcacctggacggtcaactttgttgataacaacaataggttttaagttgttagcaaacgctttttgtgtcacaaagcgagtttgtggcattgggccatccatcgcgtcaaccagcaatagaacgctgtctaccatagacataacgcgttctacctcaccaccgaagtcggcgtgtcctggggtatctacgatattaatacgatagtcattccatttaatcgctgtatttttcgcaagaatagtaattccgcgctctctttcgagatcattagagtccatcacgcgctcagcaacggtttcacgttcaccgaacgtgccagattgctgtagtaatttatcgacaatagtagttttaccatggtcaacgtgggcgatgatggcgatattacgcaagttttcgatcacaaaatttgcctcaggcattgtagaaataagcgtgttattgtacacgctttagacgagagactaaacaagatcacaataatgattgcttaacaatatgcaattaattgaattgtgatccttttcacgcctcagaaataagtcgtcttgaaccgattgcaccaaaattgtgcaactattcagacttaatttgcaccaaatttgtgcaataattaaaaaatcacgggggatattctacactaaacttcatcaatacagtatatatccctttttagataagttggcatgcttttcgcaatagaatttaggtgagcaaaaaattcaccgaaaaatgtgtaaggccactgcacttaataaaaccattcgccaggagagttactatgtcccttgaacatgtgttatccatgattgaagaacataaagttagatatattgacttacgtttcactgatacccgcggtaaagaacaacatattactattccggcgcatcaagttaacgatgatttctttgaagaaggaaaaatgttcgacggctcctctattggtggttggaaaggcattaatgaatcagatatggtgctaatgcctgatgctacaacagcgatgcttgacccatttttccaagatccaacattaattattcgttgtgatgttttagagccaggcactatgcaaggttacgatcgtgacccgcgctctatctcaaaacgtgcagaagactacttaaaatcaagtggtatcgctgacaccgtcctatttggccctgaacctgaattcttcctttttgatgatattcgttttaaaaatgatatctctggtgcttcttatgccatcaatgatattgaagcagcatggaataccaatacacaatatgaagaaggtaacaaaggtcatcgcccaatggtaaaaggaggttacttccctctccctccggttgattcctcacaagatattcgctcgaccatgtgtaatatcatggaagagatgggcttagtggttgaagcacaccaccacgaagtcgcaactgcaggtcaaaatgaagtggcaacccgctttaataccatgaccaaaaaagcagatgaaactcaaatttataaatacgtagtacaaaacgtcgctaacgtatttggtaaaaccgcgacctttatgccaaaacctttagtgggtgataatggctcaggtatgcactgccacatgtcactgtctaaaaatggtgtcaatttatttgctggtgataaatatggcggattatctgaaatggcgctgtattacattggtggtattatcaaacatgctcgtgcattaaacgcatttactaacccaaccactaactcatataaacgcttagtgccgggatttgaagcccctgttatgctggcttattctgcccgtaaccgctcagcatccattcgtattccggtagtcgctagcatgaaagcacgccgtatcgaagtgcgtttcccagatcctttagctaacccttaccttgcatttgcagctcaattaatggcaggtcttgatggtattatcaataaaattcacccaggtgatgccatggataaaaacctctatgacttacccccagaagaagctaaagagatcccaacagtggcaggttcattagaagaggcgctcaatgcccttgataatgaccgtgaattcttaacccgtggcggtgtattcactgatgatgctttagacgcttatcttgagctattacgtactgatgtgcagcgtgttcgtatggcaccacatccacttgaatttgaaatgtattacagtgcgtaacgcacaatagttaaagtacttactttgcttatgatttttttgttgccgtgaagctattttgcccatcttcggatgggctcttttctctctaatgaggcatctgttaataaattacgcatctgttcatttatgaaaaaaaaggtaagatgcactaaaatggtgcaatgggagtattcaatatggaaacggcggatttacctgataacacacttattttggattcattaatccactcagtattggttatcaaccaagagtttattatttgctatgcaaaccatgctgcattgcaattactggctcaaagtcgtcgcaaattatttgaaaccccttttagcgcactgtttagttattcctcttttgatgaacagttaatgcgtgaaacattagcaaatgggcaaagcttcactgataacgaagtgattttggttattaataaccaatcacacactatgtcgctcagtgcccagcctatttccgagcaacacattttgttggagctggcgcctatggatagtcaacgccggttaagccaagagcagatacaacaagcacaacaaatggcggctagggaattggttaggggactggcacatgaaattaaaaatccactcggtggattacgaggggcggctcaattattagcaaaatcattacctgatcctgcgctgactgagtatacccaagtcattattgaacaagccgatcgcctaagagcgcttgtggataggttactcggtccacaacatcccggcaccaaaacctttcagagtattcatcatgttgtagagcgtgttgcacaacttatcacattagaatgccctgaaaatgtcaccttactcaaagattatgatcctagtctacctgagctttcacactatccggatcagattgagcaggtattgttaaatatcacccgtaatgcattacaggcagtggagaaaactgggggaactattattttgcgaacccgaacagcgttccaagtcacactgcagggtgaacgtcatcgactagtggctcgcattgatgtgattgatactggcgcgggtattcctcctcatctacaagacacgcttttttacccgatggtcagtggcagagaaggcggaaatggccttggtttatccattgcacgtagcttagtcgaccaacacgccggtaaaattgagtttaccagttggccgggaaataccgagttttctatttacttgccaataaaataggagataaccaatgcaaaaaggaaatatatgggttgtcgatgatgatagctctattcgctgggtacttgagcgagccattacacgagaaggccttacatgtaaaaccttcgaacacgctaatgacgtcctcagtgcactcaatagtgaacttcccgatgtattattatcagatattcgtatgcctgatattgatggtttatctctattaaaaagcgttaaagagcaacaccctacgttgccggttattatcatgacagcgcattctgatcttgatgccgcggtaaatgcttatcagcaaggggcatttgattatctccccaagccttttgatattgatgatacacttgcactcattcatcgtgctattacgcactatcgagagcaaaaacaacctaatacaacagaaactaaccttcaatctgtctctgacatgattggcgaagcccctgcgatgcaagaggtttatcgcattattggccgcctttctcgctcatcaattagtgtgcttatcaatggcgagtcgggtactggtaaagaattagttgcacatgctcttcatcgccatagtccgagagcacaagccccttttattgcactcaatatggcggctattcccaaagacttaattgaatcagaactttttggtcatgaaaaaggggcatttactggtgcatctcaagtacgccaaggccgttttgaacaagcaaatggcggttccctctttcttgatgaaattggcgatatgccactggatattcaaacccgcttattacgcgtcttggctgaaggacaattttatcgtgttggcggttatgcccctgtgaaagtcgatgtgcgtattattgccgcgactcatcaagacttagaaaaacgcgtaatggaaggtgattttcgtgaagatctctaccatcgactcaatgtaatacgtattcaattgcccccactgcgtgatagaacagaagatattccaagcttagcgcgttattttctccaaaaaaccgctcgagagcttggtgttgaaaccaaagtgctccaccagcaaagtttacattgcatgatggaataccactggtcaggtaacgtcagacaattagaaaacgtatgtcgttggttaacggttatgaccgctagccaagagattatgccgcaagatttacctcaagagatccgccaatcagatgagaagagcaaatcgatacctcgagtctcctctcaacattggtcacaacatctttcattatgggcggatgaggtattcagtgaaggcaaagaaaatattcttaatgacgctctaccgcaatttgagcgcaccttactactcagtgcgctttcctatacaaaaggccataaacaagatgctgctcgtttattaggatggggaagaaatacgctgacacgtaaattaaaagagttaggtatagaggagttttaagtcactcccctcccttttatttttgcccactaaatcactcgagagaattggcgttggcgcatttgattacgtaaataagtatcaaaacacatacaaatattacggatcaataaacgtcctcttggagtgacctgaattttttctgcgctgatctccaccaatccatcttctaccattggtgcaagcaatgctaagtcttctttaaaataatcttggaaatcaagctgatatagattttcaatctcagtaaagttaagatggaaattacaaatcaaggtcttaataacatcgcgacgaatacaatcatcatgagttagagagagtccacgccacaacgcatgcccttcgctatttacgcgagcataatactcttttagcactttttcgttctgcgcatagtgatcacccagcatactgatagctgaaacgcccattcccaataagtcacactcttcatgagtggtatatccttggaaattacgatgtaaaataccttggcgttgtgcaaccgctaattcatcatcaggcttagcaaagtgatccataccaataaactgataaccatttgtggtgagtgtggtgatagtctcttgcaagatctctaacttttcttctgcaagtggtaaatcttcatctttaattttacgttgtgcggcaaataaattaggtaaatgggcataattgaacacacttaagcgatcaggggacaattcaatcactttttttaacgtaaaagcaaaactttctttagtctgtttaggtagcccatagatcaaatcaatactggtagaatgaaagcccacttcacgcgctcttgctactaatgaaaagataaatgcttcatcttgttcacgattaactttttgttgtacctctttattaaaatcttgcacccccatacttaggcggttaaatccctcattgtgtaaatgatcaataacatctaactcaatctcacggggatcaatttcaatagagagctcagcattttccacaaaatgaaaatgttgtcttaataaagcgactaagcgactaatttgctgtttatcaagaaaagtgggagtaccgcccccccaatgcatttgggtcacttttctatttttaaaatagcgagcgcgattaataatttctttttctaaaacatcaagatattcatcagctttatgtttatggcgcgtgataattttattacaaccgcagaaataacataacttatggcagaaaggaatgtgaatatacagtgacagaggtcgttcgggataacgctttgttgcttgttcgaaatccgcatcactatattgctgattaaattccaatgccgttgggtatgatgtgtagcgcggacctgaatagttatacttatggatcaggtcaagatcccaaataattgtttgttctgacatgcttctaccttccaaaagtgaaccgccgatgtgccataccagccaacagacattatgaccaccagaaataatagtgtaaccaataaatgcttaactgaacacgagagaaaaaaagatcctgtttttgaccttttcactctatctgtaaataatcactcaagtaaaaaatatgatatagatcacattaaacggaaatagtattactgttaaaatttatttatgaataaattaagtttattcaatatgttagtagcgcattttaataatacatcttttttcgattatttttataacacattaaaaaaaatatattactcaaaatacactttaaaataaataaatatatcgttttattaattttattatatttttattctctcataattcgatagttataattataatgataattagccctttacctaatttataatattacatactctatatttaaacattgattaatatccaattaagtcgtgttttgatttaaatttgaggctcagtaaaagaataaaggtcgctatattacaaggaaagatagcactccccattaccttttcgcattcattctgatatttctcttatttaatcgtctctttatatattccgaattaaggattatgcgccacggaaggaaatggacaatcaaccaaggatggttagttctctgcgatatatcatttccccccttaatgtttcactctcaaatcagtagtctcacgctgtttatataaaatgcagataaaatcacccaatataaataagaataattattatttataatagataaataaaaacgcggcttatatttacaatataaaccgcgtcttttaaaagagtaatcactataacaaactgttattgtccctctttttcatagtggggagagcgaggaccatataagatcccattggcatgtccagcagagagtaaacgcacacttgctactcctgcaatttcgtgacttttatctgcaatagtatcaacaatttgagtcactactgcagaaactaacatgcccaccaaaccattcgatgctgtatccccttctgcactcgatgcactggcatgtccactccacagtaaggcaccattacgtaaatcaaccaatttagcactggcactgacacgcgtctcactggcgatcacttgataagaagtaccatattgggtgacatccaaatagagcacagaatccgcaccaaaaatctcacgtaacttactaggactcaccgcttggatatcgcttcccgttgacaaaccattttgtttaaaggtctcttcaacaacggcgacaggaaaaacataatagccagcttccgccaaaggataagtcacttgagataaaaaactatgggcagcttctacttctggagtctgatttttaggtaacagcactaaaatgctttttggtttacttgctttaaaggcggtatagtctgttttgactggctctgcacatcctgataacacaaaagcaaatgccacaaaaactaacgttaaaatgcgattcatttttgtgctcccttatttttcatcagaaaatccataaactttgctgattcaggataaagagttttctcctgatcaaactcactcatggctaagtctaatgcgccagtggtcacatataacatgcccaaatgtgcatgtaaccccggtggaacgcctaatgatttcgctcgggcaacctcaatgctttttttcaatgcatcgatttgcgcatgaggatcactttcactttgttgataatattgatataccaccgtttgataactatcccagttataaagaggctttggcgcttggcacccaaccaataacaacgaggcaaatagcaaccccagcaatgattttgacatttttatatccttataaaattggggttactgctcaggctgccaagcatggctttcaatccctgcaactaaattattcaccgcttcacgaatggctaaatcaagcactttaccattaagtgttgagtcataacttgctgtgccaccaaaaccaacaatctcacgattagaaagctcgtattcccccgcaccttgcgtagagaacaccacttcagaggtattcacattcacaacatttaagttcactttggcataagcaacttgggtttttccacgtcctaagataccaaatagttggcgatcacctacttctttgcgaccaaactctgtcacatcaccagtaataacgtaagttgcgccttttaattgctgactttggcctttaatcttcgcttcttgtgttaactccgttaagttagcgcgatctaaaacattaaaacggcctgtttgttgtaaatgtgtaattaaaatcgttttagattgattacccaatctatccacaccatcagaaaaaataccattcatgtaattagaacggttatcaaacttaccaatagcaatggcactcttaggtcctgagtaagtcgtattataggtagccactttagcaacctctaaagagcgagaagattctgaggcacaacctgctagtaatgaagcagaaagtaaaactactcctaatgataatttattaaatgtcattttcatcatccaatatcggtgaaataaacctatcgtcattgattttttgttgtgcaaatcctatgacgaacaataaaataagataaattttaatttacgtttctattttacccgccattaaaccataacagtagtaaggttaataatgggatcaacttatttttaatataaaattaatcacccatagggaaaatagaaaaatgttgataaaagaaacaacaaatgaatataaagataaaatacgttatattctatctattatattagcaatataccttaagttagataaaagcagactaagacaaaagactaaaagtatattttatattaacaaaataatttaattgctgattacttttggctttttattcatcaaaccatagattgagtgaatagttatgaaacgtgaagtaatacaatttattacttcacgttaatattgatggctacctataagatattagcgttttttaccaaatgctgcggccaatgcatcactcatcgcactattacctgcattgttacccgtatttgattggcggtttctggtcggtttttgcccgcgactatgtttagaagcattatccttagtcactgactgacgtttatgatcactatcagcagccacttcatctaaacgcatggttaacgcaatacgtttacgcggtaaatcgacttcaaggacttttaccttcacaatatcgccggtttttaccacagtatggggatcttcaacaaatctatccgacagtgatgaaatatgcactaatccatcttggtgtaccccaatatccacaaaggcaccaaaattagtcacattagttacagtaccttccaatatcataccactgactaaatcattcattgtttcaacaccttcggcaaaggtggctgttttaaactcaggtcgaggatcacgccccggtttagcaagctcctttaagatgtcattaatggtaggcaaaccgaactgctcggtgacaaactctctggcattgatttgtgaaagtaatgcactattgcccatgacttgatcaattttttgatgtattgattgcaagatattttcaacaataggataggcttctgggtgaaccgtagaggcatcaagtggatttttaccatcacgaatacgtaaaaatcctgcacactgctcaaacgctttaggccctaagcgcgccactttgagtaactgttttctatccacaaaacggccattttcatcacgccaagcaataatattttgagcaatagattggctaagccccgccactcgcgtcaatagcggtacagaggctgtatttaaatcaacaccgacaccatttacacagtcttcaacaacagtatctaatttttttgccaataatgtttggctcacatcatgctgatattgacccaccccgatagatttaggatcaatttttaccaattccgccaatggatcttgtaagcgacgagcgatagaaacagcgccacgaagagaaacatccagatccggaaattctttagctgccagctctgatgccgaataaaccgatgccccggcttcgctcacgatcactttttgtgctttaacttctgggtagcgttttactgtatcagcaaaaaaacgctctgtttcacgtgatgcagtaccgttaccaatcgccactaactctacattatgcttaatacataatgccgctacactagcagcggctttatccgcttgtccggtatgaggataaatagtatctgtcgcaatcagcttaccggtactatccaccaccgcgactttaaccccagtacgtaaaccaggatctagccccatcgtagctcgcatacctgcaggtgcggccattaagagatcttttaggttacgtgcaaacacattaatggcttcatcttccgctttctcacgtaactgacccattaactcagtttcaagatgcattaacacttttatacgccaagtccagctgacaacggctttacgccaactatccgcgggttgattattaagacgtaaacctaaatgctccgtaatcaactgttcgccatagctctctttgggggcttcttcgaattgtggatcaggattaagtgataactgcaaaataccttcattacgaccacgaaacatcgctaatgcacggtgagaaggtacatgagcaatcggctcatgagtatcaaaataatcgctaaatttagcgccttctgcttcttttccgtcaacaactttgctaacaagatgcgcatttttccataaatattggcgaactttagctaataatccagcatcttctgcaaaacgttccattaagatatagcgagccccatctaaggctgctttactatcatctatgcctttttcagggttgatatatgcacttgctgcgtcttcaggagtatgttgtggttcattccataacaaatcagctaatggctctaagccattttcaattgcaatttgtccacgagtacgacgtttcggtttataaggaaggtagagatcttcaagttctgttttactttgcgtctcattaatcgaagagcgtaattcttctgtgagtttcccctgctcttcaattgattttaaaatagtttggcgacgatcattgagttcccgtaagtaactcaggcgggtttccaattgacgaagctgagtatcatctaacccaccagttacctcttttcggtaacgggccacaaaaggcaccgtattcccttcatccagtaacgtaatggccgaaagtacttgctggggctttactgatagctcttgtgcaataattcggcttaatgattcattcataatatatttacctaccgagaggagtggttaaaaaagatggctattatacacgcgcaataagaaaaaaattccgcttattataggccaagcatgacatttatgaggaaaataacagattattctgtgattcgcgctatagtatctgtatgaaattcaatgttgatgatcgtatttattggtaatggcaaaaagtaactatattactcgtgatggctggcatgccttggataaagagctaaaatatctttggaaagaagagcgtcctcgcgtcactcaatcggtctctgaagcagcggctcaaggtgaccgttcggaaaatgctgaatatatctatggtaaaaaaagattacgtgaaatagaccgacgagttcgttttttatccaaacgtcttgatgaattaaaaattgttgacccagatcctcgtcaagaaggaaaagtgtattttggcgcttgggtaacccttgaagacgatgatgaaaacattaagacatttagactagtcggccctgatgaatttgacccagcaaaacagtggatttctattgattcccctgtcgcgagagcgctgatcggtaaaaaagtggatgatgaagttagcgtgcaaacgccaggtggcatcgttaattactgcgtattatctatcaaatattattcggaataagataaataaatagtgtgatattctaagatacaaagtcagaacaagttttgcctataaatcattaatatttattctttgtttttggtttaatattcttatcaatgatagaattcgctaataaaagcatttgcacttcgggagcttaaagatgcaagacagttataaagtgctgattgtggatgatgatttacgtctacgttcactattagagcgctatttgacagagcagggttttcaaatccgcaccgcggcaaactccgatcaaatggatcgtttacttactcgcgaatctatccatcttattgtcctcgacttaatgcttcctggcgaagatggcttatctatttgtcgtcgcttgagaagccaaaacaatcctatccctattattatggtgactgccaaaggggaagaagttgacagaattgtcggacttgaaattggtgctgatgattatatctcaaaaccatttaacccaagagagctattagcccgtattcgtgcggtgcttcgtcgccaagccaacgaactaccgggagcaccttcacaagacaatgcgattgtctcatttggtaaatttaagcttaacctcggtacgcgggaaatgttccacgaagatcaacatatgcctttgaccagtggtgaatttgccgtattaaaagtccttgtttcacatccccgagagccattatcacgtgataaattaatgagtctggcgcgaggtcgtgaatatagtgcgatggagcgttctattgatgtgcaaatttctcgtttacgtcgcatgattgaagaagatcccacccatcctcgctatattcaaacggtttggggactgggttatgtctttgtacctgatggaacgagcgtatcataatgagaaggctgaggctttcaccccacaataagctcactcgctctctatttctggttatctcattacttttttttagcttgatagccagttatgttgttgtacagcatcttattgtcgggccaagcctccagcaatttaataaagtattagcgtatgaaattcgtacgctagtaccggaagaactgatcttagtcgatggcaccccacttaaaatttctcccgctctacgtaataaaatttacaacgagttaggtatctcattttttgataaagacgccgctttaaaagctggtttagagtgggcaagagaagatttagaacttagccagcagatgacggattatctcaatagtgatacgacgatttggctagaaaacaccctagagtatcctattttatggattaatacccaactctcacccacgctatggatacgcgtaccacttaccgaattagggcaaaatttcttattacccgtttatcggcaagccattatttttatcatcatcgtagtggcatttttctggttatataaccgttttcaaaatcgtccattgcatgaagttgaatatgcagcacgacgcattggtaaaggggtgatccctccgccaatacctgaatctggcactgctgaaatgcgttcaattattcgagcatttaatcaaatgtcatcagatattcgctcattagataatgatagaacactggtgatggcaggagtaagccatgatttacgcactccgttaacgcgtattcgtcttgctacagaaatgatgagtcctgaagatagttatcttgcagattctatcaataaagatattgaagattgcgatgccattatcggtcaatttttagactatatgcgcacaggcaaagagatgtctttagaattatgtgatatgaatggtctattgcgagaagtgatctgcgctgaatctaactcaggtaaagtcagcgaagagcatttatacccttatcctatcaatatcacagcaaacccaattgccgtcaaacgggcgcttaccaatatgattgttaatgccacacgctacggacatggttggataagcatcacaagtaatcaaaatgaagaatatgcttggtttcaagttgaagacgatggtccaggcattgccaaagaagatagacaacgtttattccaaccctttgttcaaggggaacaagctcgaagttcaaccggtgcgggtttaggtctatccattattcgtcggatcatggatgcccatggtggctttgtcgaactcggcgatagcacgaaaggcgggttacttatccgtgccaactttccgttaaaagtgcaagaagacgaagatgattaatatcctcacttttcaacgttaacgcccttcttattctttctcacctatttttatgcattattttcactctttttctgctttgtcataaaactgtcacaattaagacatttaattgtcatctaactgacctattgtctgtgcgtaccgtaaccgaagttgatagatgtcgaaaagttattctacctatcccacaggagggattatgaaactgatgcgtaccaccctgaccagtgtcattgccgctgcactttcaatgacggctctttctgcacaggcaacgacctcactgactggtgctggcgcaacgttccctgctccagtttatgcaaaatgggcagatagctatcaaaaagaaactggcaacaaagttaactaccaaggcataggctcttctggtggtgtaaaacagatcattgctaatactgtcgattttggtgcttctgatgcaccattagctgatgaaaaactcaaggctgacggtttattccaatttccaactgtcatcggtggtgtggtgatggcagtcaatatctcaggtattaaatccggtgagcttgtcttagacggtgagactatcgggaatatctacttaggcaagatccaaaaatggaatgatcctgctatagctaaactaaatccaaaactcaatctacctgaccaaaacattgctgttgttcgtcgtgctgatggttcaggcacatcattcgtttttactagctacttatctaaagtaaatagcgcatggaaagatgaagtaggcgcaggctctaccgttaaatggcctacaggcttaggtggtaagggaaatgatggcatcgcagcctttgttcaacgtctaccaggctcaattggttatgttgaatacgcttacgcaaaacaaaacaatcttgcatatactcaattagtcactgcagatggcgaagttattcctcctactgccgatagttttagcgcagcagcgagaaaaattgattggagtaagagctttgcacaagacctaacgaatcaaaaaggcgaaaatgcctggccaattacttctactaccttcattttagtgcatcaaacgcaaaaagatgcggctaaaggaaaagaagtactgaatttctttaactgggcatatgaaaaaggcaatgatgaagcgaaaaatcttgattacgccgtattgccaaaagaagtggtagaacaaattcgtgccgcttggaaaacaagcatcaaagacagtaatggtaaaccaatttactaaccaaagggttaccattaaaaaatagattaacgttcaccccctgcaacacagggggtaataaattaaagaggctttatggccgagcatacaacggtaataaaggccccgagtaaacgaggggacgttatttttagcgcactagttcgactagctgcgttaattacacttttgcttttagcaggtatcattgtttcactgattttcgcctcatggccaagtattcaacaatttggtctgtcattcttgtggacgaaagagtgggatccacccgcacaggaattcggtgctttagtaccaatttacggtactgtcgttacctcaattattgccctgatcattgcggttccggtgagttttggtattgcactctttttaacagaactggcacccaattggctaaaacgcccattgggtatcgcgattgagttattagctgctattccaagtatcgtttatggtatgtggggactctttatctttgcgccgctctttgccacatacttccaagagcctgttggcaacgtgctctcatcagtccctattgtcggtgagttattctctggccctgcgtttggtatcggtatattagcagcaggggttatcctcgcaattatgatcatcccttatatcgcgtctgtaatgcgtgatgtatttgaacagaccccagtgatgatgaaagaatccgcttacggtatcggctgtaccacatgggaagtgatttggaatatcgttttaccttatacccgaaacggtgtgataggtggtgtgatgcttggattaggtcgtgcgctcggggaaactatggctgtgacctttattattggtaacacctaccagttagactctgcatcactctttatgccgggcaatagtattacctctgcattagccaacgaatttgccgaagcagaaacaggtcttcataccgctgcattaatggaattaggtctgattttatttgtcattacctttatcgtccttgcgatttctaagtttatgacactacgtttatctaagaatgaaggagcacgttaagatggctaaaacatcctcttcttcattacaagttcaaacagaaaaagaactgcatatacgccataaacgccaactttggcgtcgtcaaaaaaaccgtatcgcactgtttttatctgtctctaccatggcatttggtctgttctggttaatgtggatcttgttttctacagtaaccaaaggctttgatggcatgtcttgggccttattcacagaaatgacaccgccccctaacaccgatggtggcggattagctaacgccattgtgggtagtggtctacttattttatgggcgacggtcattggtactcctttggggatcttagcgggtatctaccttgctgagtatgggcgtcgttcatggttagcggaagtcatacgctttatcaacgatattttattatcagccccatcgattgttgttggactgtttgtgtataccattgtggtggcacaaatgcagcacttctctggttgggcgggtattgtggcattagcgttattacaaatacctattgttattcgcaccacggaaaatatgttgaagttagtccctgatagcttacgggaagcggcttatgcattagggacgcccaagtggaagatgatcgctaaaatcacgttaaaagcctccgtatcgggtattatcacgggcgtattattagcgattgcgcgtattgcgggtgaaacagcaccactgctatttacttcactatctaaccaattctggagcacagatctaaacgaaccgatagccaacttacctgtgactatctttaaattcgccatgagccctttctcacaatggcaagagcttgcttgggctggcgtattactgatcaccctctgtgttctatttatcaatattatcgcgcgcgtgctgtttgctaaaaataagcatggctaacgcagaaagttaagcaagagagaacgttgaatgactatggctaatgataacgctggaaacaaaatccaagttcgtgacttgaacttctactatggtaagttccatgcgctgaaaaatatctcattagatattgccaaaaataaagtaacggcatttatcggcccttctggctgtggtaaatccactttactgcgtacttttaataaaatgtatgagctttatggcgaacagcgtgctgaaggtgaaatcttgttagatggcaacaatattctgacagataagcaagatattgcgctattacgcgcaaaagtaggcatggtattccaaaaacctacaccatttccaatgtcgatttatgacaatatcgcttttggtgtacgcttatttgaaaaactgtctcgcgctgaaatggacgaacgcgttcagtgggcgctgaccaaagccgcattatggaatgaaaccaaagataaattacatcaaagtggctatagtctttctgggggacagcagcaacgtttatgtatcgcacgcggtattgctatccgtcctgaagtattattactggatgagccatgctctgcactcgatcctatctctacaggtcgtattgaagagcttatcagtgaactaaaatccgaatataccgtggtgatcgtcacccacaatatgcagcaagctgcacgttgttctgattacactgcatttatgtatttgggtgaattaatcgagttcagtgatacggatacattatttactcgtccagcgaagaagcaaactgaagattacatcactgggcgttatggctgataacgaggcaaatcatggataatttaaaccacaataaacatatttctggtcaatttaacgctgagttagagcatatccgtacagaactgatggtcatgggtggcttagttgaagagcaattaaaaaaagccattaccgcaatgcataaccaagaccaagcattagccaatgaagtgattgaaggtgatcaaaaagtcaatatgatggaggttgccattgatgatgcctgtatgcgtatcattgccaaacgtcagcccaccgccagtgatttacgccttattatggcgatttctaaaactatcgccgaattagagcgtattggtgatgtggcagaaaaaatctgtaaaacggcccttgagaaattttcacatcaacatcaaccactgctagtaagtttagagtccttaggccaacatgcgatacaaatgctccatgatgttcttgatgctttcgctcgtatggacttagaagaagctattcgagtctatcgtgaagatgcaaaaattgataacgaatatgaaggtattgttcgtcaattaatgacttatatgatggaagatcctcgcactatcccgagcgtactgacggcattattctgtgctcgttctatcgaacgtattggcgatcgttgccagaatatctgtgagtttatcttctactacgtcaagggtcatgacttccgtcatttagggggtgaccaagtagaaagaatgctgacaaaaaatgatgatagtcattctgctaattaaataatttattcactctctttacgctctgaaacagaggcattatttgcctctgtttttttatttatgtttataaagtcactatctctccttaacttattctataaaagcatatccatatcattttttattattttatgaacttagaacaacttgatagcgtgataggcaacataacaatgagaatactttttttggggtgaataatgaaattacgtgttttggcaacggcattaattgctggctcagtgcttttttctggtctggcaaaagccgataaattagacgatataaaacaggcaggtgtggtacgcattgctatttttgatagtaacccaccgtttggttttatcgatccacaaaccaaaaaattggcaggttatgatgcagatattgcgaatgaaattgccaaagatctcggggtaaaattggaattacgtccaactaacccagctaaccgtattccactacttagcgccaaaaaagtcgatttaattgccgccaacttcaccattaccgaagagcgagcaaaacaagtcgatttctctgtaccttattttgctactggacagaaatttatcgcgcgcaaaggcgtattaaccagccctgagcaaattgcgtcattacgcattggggctgacaaaggcaccgtacaggaaattaccttacgtgaacgctatcctgaaactaaagtcatctcctatgacgatacccctcttgcgtttgccgcattacgcaatggcaatgtacaagcgataacccaagatgatgctaaattagtagggttattagctaatttacctgagaaaatcaaagctgattttgaaatatcgccctttagtattacacgagaatatcaagccgttgccgcagctaaaggtgaacagcgtttaattaacgagattaataacacgctattaagattagagaaagaaggcaaagcagacgaaatttataatcgttggtttggccctgatactaagtccgctcaacctcgtggtgactttaagtttgccccactttctgagcaagcgcctcaatcctaatggtagagcaaataacgacttaatttatcgcgatgatttattgataaaacaccaaccccgctactgcggggtttggcgtctgcaataggtaataattatgtttgcgcagtttctttctcactatcttcttgagcctcactacttaagttggctgtggcaaggttttttaatcaccttgcttatctctttctggactatcattattgccacattactaggttttcttctcagtgctgcctatgatagccatatcgcgccattacgttggtgtgcggccatttatacttcactctttcgtaataccccattattggttcagctcttcttttggtattttgcttctggtgaactattgccacaaacggccatgatatggcttaacaccccacatgaactttctttatttggcttaacgctctcttggccctcttttgaatttttagccggtattattgggcttaccttttactctgtaccttttattgcccaagagctaagagcaggaatacagggagtcagacaaggccaaaaatatgcagctttagcgttaggattaacccactggcaatccatgcgttatgtcattttaccgcaagcttttcgtatcgcccttccgccattgttgggtcaatatatgaatattatcaaaaactcctctctcactatggccataggtgtcgcagagctttcttatgcttcaaggcaagttgaaactgaatcattacgtacttttgaagcgttcggcgtcgccaccatactgtatatcgctgccattgcattaatggaagcttgggggcaatggcatcagcaacgaaaattagcgcaaggatattaatatggactttactgttattgctgataattggcagtatctactttttggcgcgtatcctgatgggccattagaaggtgcggctttaactatatttattagtgtgatcgccggtattgtatctattatattagggacgcttggggggatcgctctcgccatgcttaaaggggtatgggttaacttatttgccgcttttttaggttttttccgtgctattccggtcattatgttgattttttggctctattttctattacccgtggtattaggaatggaaattcctgagataaccaccgtgatctgtgctctagcacttattacctcctcttatatcgctcatggtgttaaagccggtattctcgctattggcaaagggcaatggcaagcaggtttatcgttaggatttaatcgctggcagacgctttggtatatcgtgttaccacaagcattacgtatgatggtgccctcttttatcaatcaatggatagccttaattaaagatacttccctcgcttatgttgtaggtgtcggtgaactctcattcttagcaacacaagttaataatcgcagcatggtgtacccgatggaagtttttttatttgttgcctttatttactttgtgctctgtttttcattagagttaattgccaaccgagtggggaaattatttaccacccaaaaagaaaaacgctctttttggcaatatgttatccctaataaaaaaccttcactgagtgaaaaaattatttaacttattcatcccctaataatattgattaggggattaaataataaccatcacaatgtcttactccttaaaattttttagtgcttttaaacgtaagatcatatcaaatgctaatataaattcctgatagagtttatttctccgctcaataaaatagagataaataactaaagataaactcaccgaataaattaaaaagaaattctcttttatattcagcaaatagaataataaacagagtaacaatgtacctaaagggatcaaaatcagaaaccataatacacggcaaaacaggcctcttttttttacctcagcaaaatcttcttcaaagctataacagataatcatccccattaggtaattaattttactcgccttcgataaaaaaagcataacaaacagaacactatataaaagaatgattaatgcaacaataaactcaatattaagataaccttgctctaacgagaaagtagcactgttctggagcggaaaaacaataggaaaattaacaagtaaacttaaaaaaacctcattaacaataatataggatatgttaaattttttcttctcacggctatataaagaaaagttattcaaataatgaattgaacaactgacataaaacttgatcaaaaaatacataaaaaaccatatcattaatggtgacaagaaaaaaccaagaaaaataataatatatatttggctatcaaaaacaatctcgattaaataagaggtaacaagaaatattattataaccccaattatatagcttaacgaaaaaacagtaaaataacgtgatattatcgtcctttttatatcgcttttattattattttttaaataaaacttttcagaaaaaatacagtatcgccaatatattcgctcattcatcattgcactgagtaaaatgacaataaaaatagcaaagttacccataaataataaccaaaaacttaactcattataattattaataaagcataaacttaatactatcgaggcgatataaataggtgttagcatagtatgatgatgcgcttgcatataataatgataattaggcaacataattgctcctatataagataattaaatataatcattaacatgcaatatatttttatcttttagcgtatgtgaatttttcgctaaataatacaatgacttgctatcaccaagttcaataaaattgtgatagcctaaatgacaccatagcgccatagttgctgtccatcttacggtttctgtgagttgattaactaaattctgtttaattgtctcaatatcgctaacaatctcagcagaaacattcatcactaggggtttatctgggattgaaaaagggattgtctgtaaaaagtgagcaagtaaatttttcccttcgctcatcaattcagtgtgccaagcaccattaacggctaatttattcgtttctattttcatattagctaattgattaacaaccttacgtacacttgcatactcccccccaataacttggtgaagttcactgttatcacagcaaatattcacctttgttgcgagatcttgctggtcaatcaatgttgataacgtctgataagagcaatttttaacaacatacattacccctttgttattcttagcgagctgttgcatgatagatgcgcgataactaattaacttaaagacagattcaagttccagtacgttcgccgcaaataacgctgaatattctccagcgctgtgccctgaataacccgcctcattcacacaacaatgctcacgcagtaaataaagagaagcaatattgatagttgttaacgccacttgctgataacaggtttgtaccaatttattcatgggcccttttaaacaaacagtccttacatcgaaccctgctatttcactcgcacaattccatacttcttttattgatggaacgtcacgatataccctatttcccatacctaaataaggcctaccctgacctggaaaaaataaaatgctctcttgattttggtgatactttttctctctcaatggcatagaccatactcctaaatagtaatattatttttttgatatttttgtaaatagtggctaactttaaaaatagagatacacgaagcgattgttgcggaaaaaaataataatagagggattttaaacatagcatcatattgccatagccaagggagcattaatgaatagctattattatcagataaagaaatattgatttgtttcaaattaatcaaccaagataataactgatgaattaataatatcgttatagaaattgttatagtcataaaaatagccaataaaataaataatcgagaaaaactacctcgccaaatacctaatcgattaaattcgaacagatcaccaatagcttttttgatagtgatgataatgattttattcactaaaaaataataataaatagcaataatgctatacaataatagcattgaccacttaaagaatgtcacaatagaaataatataactttgtctctcaataacagggatcacttgcaaatttaaagatttttctttattaatccttgttattttagctattacgctattcatatcatgcacattttttaatagaatatttatttttgagacacttttacttttttttatatattgtagtgtttctaatggaattttgatcatggcataaggataactatttatttgtgtgttaaaaataccacgtacataagttggtaataccattttttcattattatgaataaatacaacattaactaaatccccatagtttatatttatagcatcagcaataaacttatctatcgtgatctcagttcttctgacatgagacaattcactccctgaaacagttagatcgtatgctcctatagttaataatgacttaggctcgatagctaggccagaaaacaatactgcttttttattgataacattttctatcatgcctgaaaaaataatttgtggtgaaatgacctgaattttttctaataactgcttatcataagttaataaatggatgatttcttcagcattggttatttccaaataatctttcttatcagtaatatcctgtttattatcttttttataaatttcgatatgccctaaattggaatatgctacttgctctttgagcagtagcgtgaggtgatgataaaaaccctccaaaatcgagatggcgacacagagtaaaacgataaaacataaatttcgataaaaatggctaagggttatataaagtaaccctaatgtgtatttgatataaaaccaagataatgaactagaaagtaatactatcaaaataaatattgagatgaatataataatattttccattaatcactctctaatgttattggttgaataaccgcggtcttttcaatagataaccaaggaggaacgctagtgaaactatatcgagcaatttttttactcgcctcattttcttgaagtaattgagccatgatcttttttgcttgtgtcacttgctcacaactaaataatgcacgcgcatacatatagttaatcatgggtataagttcactattgatattaatattctcaagtaattgctgactgtcttttttagccaccacacagcgccctaaataacgaggtgtaaaagcatccattcttaatcttagatagatcaaccgccaattagttggattttgttcaacaacttcatcaagataaaaaaaggccttttttattgtctgtgcagcctgagaataagctttatttttatgataataagcggataaaaatacactgacataaccataaatgactttatcaaatggataatcaccttgttttatactgtattctaactctgaaattaatgaggtcaatttatcactggcagtaaatgtattcagtgatataaataataaaaaacgtttatcactatttttaatgtctattttactctctacttgcgagagcaatagagaaattattattaaaataataccgatacaattaagttttctccccatcatataactctccatgtttaagcgttataattttatctacagtcatgtttagatgattacaattagtgattaataatattggtatagataaatctttatgtacttgtgataataattggataaaataatcaaagttattctgactgaaacaatcattattataattagcaatgatacacttaggttttttcactaaagctctgctaaaggccacctttagcaattgatctgttgataacgattttggggttttattatagagtttttctatgcccatagatttaagtgtatttataatattattctttagcttttttttatctttatgatcgactactgaataataaatattgtcaaatacattacaatgattaaaaaagtaattttctttgaaaacaaaaccgatcattctattccttaataaagctcgctgcttttcatctagaatatttatataattacctaaaaaataagtataaccagcatattgaatatcaactcctgaaataatatcaatcaatgcattcttttcattctcttgttgatattttattaatgtaaaatgctcattattaatatcgaatgtgagatttttaaaaattatttcagcgttacttttatcatgattaaatttattaatatttgttagtgaaaatagtgctaattggcgtgcttttgttattccatacataaaataccttattattgtttccaacaatcaaccagccaaacaccattttctccatcaaacgcactcaaaaggtaatgagaggcactatctgctgctttttgtaaatgatcgaacataagagccggtgtgataaacccactatcaccataaagacgatttaaaaaatagcaattaagattaacaggtaacgctgtgaatgcggtttcaagtatagaaatatatttataagtcagtaacgcagttatataaattgaacccgtctgtttattaatacaacggtgccaatttttaactaattgctttattgccttttttctattttgactcatagaaaaataatgattgataaaaatcgaaatatctgaacactgttttttattgataatgatgcaggcgactctttcaatactatttatattttccaatgtattaggcttgaaaaaaagggttatcggttgtctttctatttcactaaaagataaaattggtacagcccgaaaaccaccacaaataaatatattatcaagtaaatcactattaatgagcttttgtgctaataatagtgccgacatcataccattacgttcgcctcttattttgcaagagaaattttttatactgtatttttttatgatatttctaggaataatattaagagtaaacacatcccttaaactatctatctgttcgaaagccgttagctctccccatgcatcaatataaatcagtccatttcgctctttttttaagaggaattgtgattttgtatctaattgaccaacagcatgatcgaccacatgctctattgcagataggtaaggacgacaatttgtttttcttattccttcacgtagatacatatcatgattgaccccatagcgttgaaaactccaactttttcctgcgctttttttacccgctaaacgtaacatatgagattcccatacgttataccatgaaggaataaaagggatcagtggctcctgtggctcaaaaaaagcataagcggctaaattaatagcaccagtgggtaataatcgcctcatccttgctctccatttgcgattaataacatggcaataatagagccatccatacctaagccgatttttaaaataggtttagcgctatagttcacacactcttgattagtgaggaaattaacctccattccatcatctattggataatgtgtagttgaggggatcaatcgattattttttaatgaatcagctataatcattaaatcaataataccagagcaattagaaatataacctatctgccctttatagctaataataggaatgggttgtttaaagatgttagtaatagctaccgtctcagctttatcactaataatcgaaccattaccatgaataaaaatagcaccaatatcacttggtaaataatgactaagatcgagaagctgagaaatcacttttgatatcgtataaaagttaaataatgtgcctcccattgtccgttcagcattactttgcataaaaacggaatgatagatataagcaggtgcaagatattgtctcgagtttatctgttgttggctttctaaaatcatcacggcataaccatctgataaggtgaccccatcactgtatttactcaaaggttgagcgtgcgcttcaactaacatgccttggctatccataaaggctatatcttgtaaaagtaagctattccacgacaatactattacaatatccgccatatcttggcttatttcattatgtcctatatgcacagccattaacgcagaattactagcacaatagataggaataggtgggaaatctaactgatattcagcccacaatttattcgctaattcatcctgtgcaaaagaggctgcatggagtgattttatctgcggagaatattgaacatcttcggcatcgtttttatcataaaacccttggtaatccataaaatcggctctaggcccgtgacctgcaagatacattatggtacgtgaagcgcgaagcttttctagggtgatattagcccgttttaaactgttatgaattaatcgcgttaatatttcaaaatgatcattgggaatattttgataggggatcaccgccggattatgattaaatttaaaatattctacaaaataatcatcagagaagtatttctctgttttaattgttctttttaataaaagttgttcagaaagttgttcaaaatttactattgaaggtaaattaagttcccatccacttatcgcaacatttttcataacggtttcctgatgataattgcatagtggttacatccttctgatgaaccaagaactaaagcagtttctatctgcttattaatcggttgggtaacaaaatgaatatcatcagctataaaactttttgtataaggaataggtattatcgtgttgctttccatcatatgaatcactaaagagatcgccaatatcccagcgcatgattcaactaaaccaaaaaaggcattgtaattaactactggtacatgatttgccgcttgataaaatagttgccgaatcgcacggatttcaacttcatcattctctttattaccatcactggtaccacagataatatcaatatcttggcaactgagttgcgcctcagataatgcttgttggatagccttacataaggcggccactctatcagtaatattttcgtcttctaaaaaagtattatcattagctttaccgtagccaataatttcagcataaattttagcgcctcgttgcttggcatactctttatcttcaagaaataacatccctgccccttctccggggatatagccggcacttgcattagaataaacctgataatctgtcgcattcttggtcagattaactttcttactcatcgcttgaaaatagagtgaaatagaactgaagtgctcatctgcccctccgacaattacctgaggttgtagatcttgcctgataatttcataaccataagttaacgctcctaatgcagcattaacccctgttgccaatgtcgtggtataaccttttattccctctgtgatggcacaaaatgtcggtactgcattcattaaagtaccaggaaattctgatgttcttactttttgcggatcaggaattaaactttttaaataacgattaacggtactttgtggcccttttgacattccaacaataaaacctaagttatcaccatcacgtttaattttgcgtccagcattagcaagtgcttcatttaaagcgaataaggcataagtcccgctaggaatagcttttcttggatcataataacgtaatgtttttttcggattaacgtcagtgatagcatgataacaggcgttattttttaagcgatgatcaatgtcgagatcaaaataaggatgtcctaacgattgctcaaaatcattatcttttatgacaacagacatcaagttgtcgatatctttctgcacatcactcgcaaatacaataggttttaatgtacctgttttatctcctgccaaaatcgctgttattatctccattatattattgccaatagacgtaatcgcccccaccccggtaataaccacttttttagctttatattccgtcggtgttttatctgtaatataagggcttgcgataatagagcagttatttcctccaaaagcataattatttttcataaaaaattttacttttttatcttgaaagaaattcggtacataatttaaatcacagctatgccttggctgagtgaaatttaatgtagggggaagtttgtcttctgctaaacaaataaaacacgcgatgatttcaacaatacccgcagcaccaatattatgaccaacataagattttgttgaacttaatgggatatgataaatattaggaaacacttttttcatcgacatggtttcaatgcgatcatttgcttcagtacctgtaccatgcacatttatgtaatcaatatcattaggggtaatacccgcattatccagtgctttatacataacttgcactgcaccatttcctcgaggatcagggctagtttcatggtaagcatcacaagatgtcgcataagagacaatttcaccatatattgtcgcaccacgttcaaccgcatgttgataatcttctaatactaacgccccagcaccttcaccaatagacataccaggagtacctgaaaatggggaagttggtgttgttttcatcacattaagggcataaaaacccgcaaaggtaggaagataaatgggttctgttccgaccgctagcacaacaggatttttgccattttggatataatcataccccatacctatcgcgttagggcttgcggtacaggccgtcgccactaattcaagaccaccacgtaagccaagtagacttgatacactcgaacaacatgatgaaaatccaccggataaaatggctttttttatcgaaaaatcatcaatatgttgttcaaataatggcagaaaggcttccgttcctgccgaagagacgcccacgatcatcgcggtattatctaaaatagactgattatctattaagtttgcttgttgtaatgcctcattgcagactcgatatgcccataatgccgcattgtctagtgatcgagcgatatgctgcggtatatctgaataatctaatgccatctcaatctcagatgcattggcatttttaaaccattttaaatagcgttggcttggcttaatattacattgtctattaaaaagaacctgtttaaattgaggcacatctttagctaaagatgataaaacccccattccggttattacaacccgacggcgtctactattcatgttaattcctatataatatttattatgtttaataaatatctttgctataaatttaatctttcattattgatgtctttcaagataactatcttcggttggattaattattaaacttaaattattaacaaagggaatactcgttgtgataaaatcaatatcaccataagccgtttttattttatagtcatcaatatcaacataagcaaattctcgttttaataatattctagcaatatgttcttttaatataaaagagtatcccacttgaataactacgcctatttgttcattttggtaatagattgcatcgccttgtaaaattgcagcattctgaggcatattaattattcttgcgccaactattttctgatctaccccattatcagcacgttgttttattgcatcttgaccaataaatacatctttatcgtaactaatcgcccattgcatctgtaactcaataggacagcgactaaaaggattaatcacttgaggctcccaacaagggttttctagtcgtatattttttaaatcatcaaccccgccaatctttaaatcaaatttctcagataaagtgcataaatgtcgccaaatagacattaacttctcttcatctcccataatgtgataacaatattcaccgtgtttaccaacacgcatagtaatgacatcttcatcaacatacataaactcatgaaaaggtaatccaataatatccataccgacgatttcagataaaatttcccaagcataggggccttctagacagatcatacgccaatctggagtaagagaagcgatagcatcaatttggtagcattcaccccgttcatcttgcttatctaatactttttttatctgctggcatatggcatcactattcatccactctgaaattaaaaaatagtgttcattatcacatagtacataggcatcacttattattttccctgctttatctagtaacaatgtataaagtagttgttcatcacgaatagatgaaatgtctgcagaaataagataattgagtaaccgccaagcatcttcaccagaaattttcaccatgccataatgagaaaagtctgtcattaatatgctatttcttaccgaaaaataagcctcatgttcattagtataacgtttgggaagtgtcactccattatattcaccgaataatacattcgctttattttccatttcaaagtatttcataacatctccaataaataaaaatgatataaattaattattattgctctcatttttttcttgtttttctcgctgtttatttaaaataaatgttgttaggctatttattgttctcatataagaaggatcatcaccttctgttacttgaatattaaattcatcattaagaaagacaattatctcagtggcatcaacagaatctaattttaaaccactaccaaataatggagtatcatcatctatttgattaatactcttatttaaattgagtcgttcaataagcccttctttgactcgctttaacattttttttctttgttcaattttttcatttaacttatcgtcattttccatactattaatatcctaatttttattttgttcagagtgattatattctctgaaattaactatggtgccattagcaatgattttctttcccactcttgcctcaacagaatagtgtttaaaattgcttttatcagaaaataatagaatgcttgttatctctatggtatcccctgggtaagcagcatttttataccttaaattttgtgaggccaatacaccggaaacctttcttcgatgctgaattaaaattcgttctgatctcggctcattaagggctttggctatttctttaaatgtagttaattcaatattgtgttctattttataaattgaacaaaagtcatcaataaaagataaatactcacttgtttgaccaaagatttccgccaccataacccctggcataacaggatcggttggaaaatgtcctaataaatagggatcattaaaggtgacatgtttaatcgttttgataataggtttttcactagggacaaaatcgacaatcctatcaaccataatggtcggttgtcgccatgcacctaattttaaaaatagtgtaggaggcaataacgattgattatagagactcataagggttacctctcatcgcatcaccatcccaccatcaacaattaatgtttgcccaacaatatagctcgatgcctcggagcttaaaaatacaatggtattggcaacttcagcacttgctcccaatcgttgtaatggaataaccgatttaatatgacgtacgacttggcgtgacacttttttgaccatgtcagactcaatcatacccggtgccaccgcattgactcgaattcctttacctgccaactctgcagccaacgtatgagtaaaacctataattccagccttagcggcgctatagttactttgcccaatacttggaacaatccctgcaatagaagcaacattaataatggtcgctttttctgccgatcttaataaaagcaataactgtttagtaaattgacaagttcctaataaattggttttaataacatattcaaattcacttatatttatagcagaaaataattcatctttaatcacacctgcattgttgattaatatatgaatagcattagcatatgcctttagtttatctaaaaaatcatgaattgatttatcattattgatatcacattgtaatatatgtaagcgctgacaatattcactctctttttttagcttatctaagttatttctattttggtgatataatgcataaacatgacactgctgttcaaggtatttctggcaaattgcaatacctatatcaccattagctcctgtaacaatcacattcttattctttagatcagaatatataaacataataaaacacctataaaagcatcaattaaaaattgcaacagcgacagcataatgatcacaatgagaaatacttaataatgattgggttatttttttctgctttaataaattagaaaaatggcctgtaaaaaaataacaaggtgcgccatattcatcatgccttatttcaatatcatgaaataaaatccccaaacgaaatcctgtacctattgcttttacagcggcttctttagcagcccaaaaccctgcaacacgatgataattttcatgaattctaccgatactgtttctttcatattcagttaataatcgctgagttaacggttcaccacttctacatattgcaatagccaccttttttatttctataatatcagttcctattcccatattatttcatactcaagatggtgtatcctttgatctatgagcgacaaaatatcgctcatagataggctaaaatgttatttatttaacggcccgacaactttacctttattagtaaaagtgcctttattatcgatagtaatactttctctaccaacaataatacctgatttttcattagtaatattctcaccagaaatagtcgtgtcttttattgaattaagaataccgcgattaataatatttcctgtcacacctaattcgaaactatttttacctgacataatactattgctggcattggtatatttaccatttatatttacacgtaaatgttctacaccagaaatgacgccattgttttcaaaatcacgattaaccgtcacttcagtatcaccactcgacgcaataacaccttttaaggtattactttcaaccgaacctgtactgttatttttcagtgtatcggtttgtagtgttaatttatcctggccaaacaatgtgccttgtgaattggtaaaggtgcttgtcactacaaaggcatttttatgtgatgcaatagtaccactggtattatcaacagaggtgaatttaagctccatatccccattttctgttacaatacgtcctttattactcactaatttattaccgcttaatttcatttctcctttactaattaatccccctttctgatcaggttgccccagataaaagcccatttctgttttgaaatctaaactgctgttattcgtcagttctggtgtatcaatctctaatttctgttcagtgatcacaaatcctgatgtgttattaaatttatctgttttaaaataaatagcgtctcctttaataacacctttattattatttatataaggcgcactgatggtaacgctatcgccttctaagtaaaaaacaccaaagttattatctaatgtctgggagaaagtcacattagcaccagttttagatgctaagccaccatagaggtttttgatcttatcactactaaatgtcaagtatccccctgattttatatgtccccatttattggtaatgtcgcctttgttagtgaagttcatatcgccatcggtggcaataatcccttggtcattattcagtccagcaatattaactgtcataccatccagaccactaagaatacctaatgaatcatcgctagcagtatctgcagtcatgccggtatttttcagcgccttaccattagtatcaatttcaacacgagtaactgagcgtaggcggctatgggtattattcattgcgccactattaatactaatatcccctgatgcatcaatataagcatcaatattattgaaatcttttaggttagtattaatatcaatgacacttttagaattgatttgaccctctttattattaaataagccactattaatcttaataccattagtagcagaaataccgacgccttcaccgaccgttgcagtattcgttattggtttaccgtttgtctgaatatctaatttatctttacttgcaatataggaggcattgtttttaaattcaccactattgatagttacatttccatcagcagaaatattaccaccagagatattatcaactttcgcttctttggtttctattgagatagttttagtactttgtatttcaccagtactatttgtaacacctttatcgaaagcaaaatagatatccccctcagataagaagttacctttattattatcaagtgcaccgctatgaataagctcgatccctcccccagcagtttcaacattaccattatttttcagtggtgagttagcttcagtacctataaattttaacgatgagcttctcactcctgcattcttgactatctgcaaactatatttactagcaacgcctgttggcttttgtgcaaccacagtattatcttgtgctttaacttcattagcgccagttatcacattcacattaataccagatgcatcaagaggcgtttcaatggaaacattgcgggcaattaaatcaatctgttgcgcacttttatcaaaagtggcattacctttaacagtaatattccctttttccactttataactatcaacggtatcattttgtgtattcactttcccagtagtcaacacaacacggtcagcactaagaaagttacagctactacaaataattccagcaggattagataaaataacccgtgcttttgttccggccacctcaacaggaccatttaacgtaatggcttttttagcgttaacctcaagagtaatctcttttgccgcaccgctagataaattactattaccgtcaatatgccccgataattgagtatcagcaccatcaggactattatttaatattaaccctgcttcagaaacatcaaaactggttaatgaattactggaatagccattaatcgctgcggcaatattaagaatatcaacactactatttttttgctgttgttgcacaacaatatgagcagacggatccgcctgtactacagtcgccatatttaacgttgataatacagagaaaactaataaattaattttaaaagaaacaatttttttcctattcattataattaccttatattaagcacaaaagttaattaaataataagatctctctttatttaaaagatctattaagcactaacaggtgacaaataaaatataaaacaaaaaatcgattgaaatttactggtgagttaactttagagaaatatatttatttggcaataggaaagcatattcataattaattagatcccgaactaaataaaatgaaaacaatataaataattactctgataaaaataataccaatagagatatcattttatttctaataacaagcattattactataggtattaatgcttaattaaaacctatacctcctttatctctacaacactttttcgtgatatgttcgtcttaaaacgcaatcgattactttttaggtgcagtttctaatttatttgtgtaggataaagcgaaaaacatttttttttgggatcttttgtctatgagcatgtcatcaccaaattctgctccgcagagtttgctccaacgcctgtttaaacttcaggaacacggcaccacggttcgcacagaactgatcgccggtgtcaccacctttttaaccatggtttacattatctttgttaacccacaaattcttgctgcagcccatatggatattaaagcagtgtttgttactacctgcttaattgccgcgttcggtagtattttaatgggactggtggctaatctacctatcgccgtcgcacccgcgatgggtctaaatgccttttttgcctttgtcgtagtaggagcgatggggtattcatggcaagtggccatgggcgctattttttggggcgcagtaggtctctttttgcttactctctttcgtatacgctattggataatagcgcatattccgcttagtttacgtgttgggatcaccagcggtatcggtctgtttattgccatgatgggcctaaaaaactctgggatcattattcctaacaacgacaccattgtgactatcggtaattttgcctcccacaatgtgttattaggtgctctaggcttttttattatcgccatccttgcggctcgtaatattcatgcggcaatcttaatatcgattattatcactacggttattggcctgttattaggggatgttcaatatcaaggtatctttgatattcccccatctattgctcccgttgtagggcaggttgatattgttggcgcattagatattggcttgtctggggttatctttgcttttatgttggttaacttatttgactcatccggtacattaattggtgtcaccgataaggcgggtttaacagacgataaaggtaaattcccacggatgaaacaagcgctctatgtagatagtttaagttctgtcgcaggctccgccatggggacatcatctgttaccgcatttattgaaagtacctcgggtgtttctgttggtggtcgtaccggattaactgcagttgtggtcggtattcttttcttactcgccattttcttatcaccactggctggaatggtgccaagctacgctaccgcaggggcattaatttacgtcggggtgctgatgacctccagcttaacgcgcgtaaaatgggatgatttaactgaatccgtaccagcgtttattaccgccgtgatgatgccatttagcttttctatcaccgaaggtatcgcccttggctttatcgcctattgtgtgatgaaagtgggtactctacgctggaaagaaattaatctctgtgtggtgatcgtttcactgttatttattctaaaaatattattaattgatactcatgttattgatttaaataatttattttaatatttaataaattaatttattaataataaaaaaagcaccaataatattcatcactggtgctttttattatcttaaattacttgatataagttggtagcaacaaaccaaaaatagcggaatcagacacttcatcaccaacaatccagcgttgctttaaatagccttcttgctcaaaaccaagcttggttaataatgccctagaggcttggttatcgggatgtatatccgcttctaaacggcgtattgatagatgtgttcttaaataatcaataaaagcaatcattgcctcatacatcaacccttttccttgaaaggcgttatcaagacaataaccaatttcaccacggcaagaatggagatgatgattgaagaatacacacatgccaataagtttatctgttgctttatcaataatggctaaacgcagatattccttacgctccatatgcgtaatatcctgaataatatcttccttcgcttgttgtatattttgccaaggaagatggctccaataacgagtaacctcaggagagctcataatctggaaccactcttgagcatccttcatagcaaaagagcgtaataataatcgctctgtttcaatacgaatatcagcataacgcattttacaacttctctgattgctgtttaggcgagacaaaagcgatacataccggctctgccagtgcatcgggctcagagcgaaacatgacttcttgagtatctgctatttttaaactcggccaatattgtaatcccgcatcgaaatgggctttatcacagtaataccccaccgggccaatcaataagacacctttgtcctctaattgcgccaacgtaatatgacggttataaatattagggggctgaacatctttctcgacaatccagggttgggctgatagcggtctatctttgccataaaaagtgatccactcatgcatatactcaccccctacataagataaaggctgatgataatgctgatgccaagcattctcgacatcttgtacaaaggttttaacaccaataaacttttgacccgcattacgcacattagcagcttgtaccaccgtataaccagataccactaacataccaaaaaccgctaaaccatataacacaccacgtaatgaacgcttaggtatgacgctaattgagccgacaaaaagagcagtagccactgacataaaaggttgtaaccactcagtgatacgtcccccttcatggaaactaaaccaaataaaaataatcgctaatgggaatagcaaaataaaattcaataattgactatcttgagaagtacgccaactaactcgcccaccataaagacgtacaattccccacattagcagcactggatagaaaaccgttaaagcggcacgtaacgtacgtaaattaaaacgtgcttctatttgtgagtcgacccatttaaaggcggcaaagtcgttttgccacaaccaaataaaattaggtatgacaaacgccaaccagatagctatcgcaaagtaaaaataaggggagcgataactttgacgaactttaggtactaatacgcttaataagaataccgcaccaatcagggctaatgaggagtatttccccatagtagccacccccatcactgcagcgaatccacaccaatatttggggttgtcattgatagcgcataaaaagaaatagagcgcccaaggccagcaacccactaaaatataattatcgttataaggaatgatatcgaaattaataattcctgataaatttaaacctaacatggcaaaccaagctaggtgataatttttggttaacttataggctaaattccaaacacctaataagccgatggctatcatcacaaagtggataaaataccaataaaagctaaaatcaataccaccataaatggctggccacataataaaaccaacaaaccaagggtttttaggtgagccccaaccgccattagtaccccagttaaccgcttctacggcatcataaggtacggtgggatcaaataaatagctgacgataatccataaaaccgcataaccaattatccaccaataaactggtttgcgtaatcgagcaaatgataatgtcataataaacagaatgttaagttaattagtttaaatttatagttaattgctatcacaatacagtaaagtatagtaaaccgagcgctacattgtacgtgagtaaatattaaattgtcttaaattcgtgcttttatcgcaaaatagtttctgatagattgcgcaaccaataagatcacaaatcgagttaccattatgaatatgattaaaagaaaacccgcagctaaaacgcgtaaaaaaacacgtgaagagctaaatgcagaaggacgtgaacgtaagcgccagaaaaagcatcgtggcaatcctgctggtaaccgtcagcaggaagcgatgaaaaaagagcaagcgcaaaccaatgaacagaaagatccacgtattggtagtaaaaaaccaattccactcatcgtggataatcaggcgcctaaagtagataagaaaaaatccgcgccaacaaaaatggagcctatgcgcttatcgttagaagaagagttagcactcttagagaatgatactcgtttagatgaattactctctcgtctggaagaagggggtaaactcaatcctgaagagcaagcttatactgaaaaaacccttgatcgcatcgatgcgttaatggcggaattaggcattgagtttgaagaagatgacgatgaagaaaaaacagaagatattatgcagttattaaaaggtaagtaatttatcgttaccctatcttaatctgacagataccaaatatatattggtatctgttcatttcctttctctctattttagagagtcataattagaaattatgattttttatttaaatttattttttaaataaaagctcagacaactctatctatttcttattaattaaccctgatattctatttttcttcttttaatatacgagtaataataagtatggataataaacaacactatttagatatcgccgcagggcaaggaaaaaaagagccctctcgtatagtggcattccctgcacagccactaaactatgcattgatagaacaacgcctagaggaacagaccgaatacacagatggtgagataagctatcttagtgatgatcttgatgaaggttttttctatcattgccaacatggcgatgatgagctccatttttttatctgcctgctaccacgatcagaagattatcaaatacgtcctatgtatgcgacagatgagatgactcctgagctattagcccatgccaatgccaccactcaagacatcttattagaaacgatgttctctgacaccctacatcctttagcgagttatcgccatcagctcaatctactgaacataattgcgccagaaatgatcctcgcactggatgaatctgccgcaggtaaaggattaactcccgaatggatacgctttcaattggagacacccgatctctatcctgaagtagaaagtttgtatgttattcatgcagtttacgatacagaaaatgatccaccaaccatgttctggtttcatacccatggcttgcaacgttgtggcttaactgaagttgatttagtgatcccaagcatgttggaatcttactacggtattcctgatcttttccgttgcttcgtcaataacagtattaacaaccgccaaattgaatttggcgagccgatgctttgtggacaaacttcgtcaggattagaatatttagtcgcgctaccctttgaagaaggtatacgtcacgttaatcagtccacacctttagatagtcttagaccattagaagagatgcgttataacactcaaggggcaccacatggcgtatttctgggcgatatggctgatagagacgaatatcatcagcacccatcatcgatgttatttagaactaatgaagaaaaccctattttagaaactttctttaaaggttatgaagaacaacaagccatgatgctactacgcagtaacgaagaaacctacgaaatggcagaaaaggccaaaaggcgttggcaatattttctctccatgtttgataactaccatcagccccccgtagagaaaaaaaccggtttcttggcaaaattattaggtagtaaagagagcaatgaagaaactgagagcccatggcaatttatgattaagtttggtattccttatggtgataaggaagaaaaagagcttgagcacatgtggtttatccctcagtctcgagaaggtgaccgaatttatgctaagttacttaacgtaccattctatgtacaagaaatggaagaaggtggcatttatcccattgatattgcgttcatcactgattgggttatctcttatgaaggttatagttatacccctaatacgatttatcaactttttagccaccagcagactcactaatcccactaattaactagcactattctctgcaacgggatctgtcagtatgaccttgatgatagatcccgttaatagcattcactgattgttacactaatgatgcgcaattatctctaactgttacagtttgttttttgatgaataacagtacagccttcacggcatttatctgatagcttttcgaccattattataaattaaattgatgtacatcaagagaacacatagccattgtgggctaaattatactcaataaagatggttataattctcatttgcattaaatatttacctaatcaccctatttttcttgtgcgttttctttttaaatgcgttaataattatcagtatcattattttttgtatcaatataattagtggaaggacgttttatgtctctcattccaaatcatagctacaagatcctcagctattccccgcaaattagccctgcctatcggcagaagctattatcattagggatgctgccaggcgctattttcaatgtgatccgtatcgcacctttaggtgatcctatccaaattgaaactcatcgggtctctttaattttgcgtaaaaaagatctcgctttgataaatcttagcgaaatcgctcataacgaaaaataacagcttatttatcaactactcaggcaatacaactactggcatcactattatgactcctcttactattggtcttatcggtaatcctaatgcgggtaaaacaacgctttttaatcagttaacaggctctcgtcaacgtgtcggtaactgggcgggtgttactgttgaacgtaaggtaggtcgctttacaaccaaaaatcataaaattgaattagttgacttaccgggcacttattctttaacaacaatttcagaacagacctctctggatgagcaaattgcttgtcacttcatcttaagtaatgaagcggatatgttgattaacgttgtagatgcttccaatcttgaacgtaatctttatctcacattacaactgcttgaactcggtattccctgtatcgtggcactgaatatgcttgatattgctgaacaccaaaatatgcaaattgatattcaagcactttctgaacaactcggttgtccggtgatccctatggtatcaaccaaggcatcagggattgataaactgaaagacactattgatagctttccagccaccaaaagaaaacccgaagagttactaacttcttatccaacatggttattaaacgaagttgaatctttagctgaaaaaattaatcacgatgaattcaatttacagcaacgccgttggatggcattacaatgtttagaaggggatatctatactcatcaacgtgctgaaattacctcacaagagataaaagccattcgtcagcgcattcaaactgagcatagtaatgagccagaattagtgattgccgatgcacgttatcaaaacattgagcgtatttgccatgcagtcattaatatggagtccattaagcccaatcagctcacacaaaatatcgataaagtgatattaaatcgctggttaggtgttcctatcttcttgtttgtcatgtatttaatgtttgtgcttgccatcaatattggtggagcattgcagcccgcttttgaaggtggctctgaagctatctttatacatgggatccaatggctaggtgcaacattcaatttccctgaatggttaactattttccttgctcaaggtgttggtggtggtattaatactgtactccctctggtaccacaaatcggcatgatgtatctctttttatctatccttgaagactctggctatatggcacgtgctgctttcgtgatggatagattaatgcaagcgctaggattgcccggtaaatcctttgtaccgctgattgttggatttggttgtaacgtcccatctattatgggggcacgtactctagacgccccaagagagcgattaattactatcttaatggctccctttatgtcttgtggtgcacgtttagccatatttgctgtttttgctgccgcattctttggtaaaaatggcgccagcgtggttttttcactttatttattagggatccttgttgctattttgacgggtttactactcaaacataccattatgcgaggtgaagcttctccttttgtcatggagttgccggtttatcacgttccccatatcaaaaccttattaatacaaacttggcaacgtttaaaaggctttgttatccgcgcgggtaaagtgattatcatcgccagtatgtttattggtgcattaaatagcttcactttttccggtaaagcggctgatagtattaatgattctgccctcgcttccgtcagtaaagtaatcactccgttattgcaacctattggtgtgcataacgataactggcaagctaccgttggtttagtcactggggcaatggcaaaagaagtggttgtgggaacattaaatacactgtacaccgcagaaagtattgttaatgaacctttcgttcctgaagagtttgatctatggggcgaaattggtgacgcctttgctgaaacttgggatagcttaaaagaaacctttacattcgccgcactttccaatcctattgaggcaagtaaaggtgatggtgaaatggatacggggactatgggtaccatgggcagcaaatttggtagtgcaatagcggcctatagctacttaattttcgttctactatatgtgccttgtgtctccgtaatgggggctattgctcgtgaaaccagtcgtggttggatgacattctctattctttggggattaaatattgcttactcacttgccgcgttattctaccaaacagcgacatttagcgaacatccacaaagtagtaccatcaccattgctgctgtattgatatttaacttaattgtctttgtactattacgtaaatctcgtcatcgtctcagttttaatttaagtaacaaacgctcattagcgaaacagtgctgtggtaaacaaggtagctgtcactaagtcacaaaaggaaaaataagatggcaagtttgatgcaagttcgtgattgtgtcgcgcttaacggtcgggctgatgctcgtcttgtcagccatcagcttaatatgcctgaacctatggtaaaagcgatgttagagcggcttacattaatgggtaaattagaagaggtcgatgtagaagagtgcttggtgggtagctgtaaaagctgccctgaagccaccgcatgtcagactaaagtttatcaattacgctcctaactcactgtctcttttaaacacataccttccatatccccctgctatctcacagggggtttttctgataatcaaaatgaatttttttcaacttttgctggttattcttcattttacttttcccaccacctgcgcataatccaatccttaaatagccataaagacatctaaatgtccaaaatgaaattatatacatttaccttaattaggataataaattatgccgattactgaattctcatccattatctctacgggtacacaaggtgggttgcagatgcaatgtgcttctcgccaatttcaattattacttgatgagcctatttcattgggtggaaacgataccgcgatgacccccgttgaagcgctacttggcacactcggtgcttgtaaatgcattgttgctaagagcttcgcccgcctacaccatattaatctccataatattcgtattgaggtaaaaggcgagctagatatcgatggctttatgggaaagaataaacaggctaaaatcggctttagtaagataacgacgcatttctatatccaagcagataatagtaaaacagaaatagaagcttttatcgcctttattgaacgaacctgccctatattagataccataaccaacccaccagaatgcgaaacgctatatcatcttgaatagtctattagcgttataacctcttcattcatgccagaattgataaggcctcacactgctttaacaaggtttcactaaattcatccggatgagaaataaagggagcatgtgcggcatggcgaaaaataaccgaaggagagtcaggataacgagcatctaataaagctgcgacttttcttggcactaaaccatctaaataaccataaagccgaataaaaggacaacataaggtagtaagctgttctcgcaaatcttctgtacgtaaaatttccagcccgccgtttaatgtttcaacggaaggcaaaggttgtgccaacacgaccgctttcaaggccttagtatcttcacgagcactttgagtaccgagtgtttgcaaggctaaaaagcgctcaaccgttcgatgaaagttatcactcaattgttgctcgaaaccttttaacacgtctggcttaattcctggccatgcttcatgagcagcaaaacaaggggaagaggcaacggtaattaacgcccgtacattattaggattatcaagtgcaatacggcttgccactaatccccctaatgaccatcctagccaaatggcttttttttcaggtgcctgtgaaaaaacaatatcagccatctctttaagcgttagcacaggaaaaccttggcttctgccatatcccggtaaatcaaccagatgcagggtaaaatgcgagcttaatcgcgtaatgattgattgccaaacctgagcattcaagccccatccgtgcaacagcacaagatgcgtttttccttcacctaaagtctgccaatacaatttattcattgttatgctctcttctcttattttacagggatgtgcactatgctgataacaatagcaggatattgctggttatgtcgtcaaccattgcggtatggtaaccacagcatttgttcaagttgtattcgtcatctgccacaacaaaataatcgttgtccgggatgtttgtatccctctacccactcaatgatattgtgtggacggtgtttgcgatcaccacctcgctggaaacagatgttgacagtcactgactatcgcccaccgcttaataaattattacacctttataaatatcatcctcgccctcagatagcattatgtcttgcgaaactttttttattacggtggcttgctcatcgtcgcgagaatttagttcgcaagccagagcaaattattagcgtaccgctacatcgacatcgtcgttggcgtagaggcttcgaccaagttgaggctatcgctaaacctttggcaagatggttaaattgtccttatcaccctaataccttgataagaactcgtgctacactggcacaaacacatcttaatgccaaacaaaggcaacaaaatttaaataatgcctttatcgtaaatcgcacagtgtcagtggcaggtaaggatctggcactgattgatgatgttatcaccacaagcgcgacgctcaatgctattgtacctttgctatttcgtgctggagcacgctctgttgaggtatgggctatttgccgaaccttgtagttaaccgtcaattgggcgtatgataaccaaccagaacagtcaactattgagcaagacgatatgattactattactgatgccgcacaggcacacttcgccaaactattggctaatcaagaacccaatactcaaatccgtgtttttgtcattaacccaggaacacctaacgctgagtgtggcgtttcttactgtccacccgatgcagtagagccgaacgacacagaaattaaatttgaaaaactttctgcttatgttgatgacatcagtgcacctttcttagaagatgcagaaattgactttgtcacagaccaattaggctcacaattaacattaaaagcacctaatgcaaaaatgcgtaaagtggctgacgatgcgcctttaattgaacgtgttgaatatgtactgcaatcacaaatcaacccacagttagcgagtcacggtggccgcgtaagcttgatggaaatcactgaagatggctatgctatcttacaattcggtggtggttgtaatggctgctccatgattgatgtcactttaaaagatgggatcgaaaaagagctacttaacctgttcccagaagagttaaaaggcgtgaaagatttaaccgaacaccaacgtggtgatcactcctactactgatcctctattacaaatcccctttgatattcacctgcacagatatcctaggggatttgtgtatatgccattatcatttacaaaaggtaacgccatctttactgatttgacgttattatagtgatatcgttctctcgctcagaacataacaatgtaattaacaatataataaataagacaattatggatagttttcaatttcttagtgttgaacaagcctatcaattttgggtatctcaatcggctattttagttgatgtaagagatccgcaaagttatcgtcttggtcatgccactggcgcttttcatttaacaaatgatacgcttaaccaatttctacaagatgcggattttgatgttcctgtgatggtgatgtgttatcacggtcatagtagccaaggcgcagcacaatatctggtcaatatgggctttgaaaccgtatatagtattaatggcggttttgaagcatggctaagagagtttcctcaagcgataacttctctgcaataattacagatgagtttctcaatgatccacattatcacactatctaacccacaacttgctgatatgttcgtcaattatatggcgacaaaaggtgttcggatccacgcaaaaacagaaaatcaacaagtcagcctttggttggaaaacgaacaacaactcaatcaggttgaaagtgagctaaaaacctttcttcgtgaaccttttcaccctcgttaccaagcggcaagttggcaaacaggtacgcctcaacgtacgggtctacaatatcgcccggctttttcaatcaaaagcatggtgcaacaatcaggccctttaacggttttgaccattattttatgtgtgctcgtctttatctggcagcaaatagtgggcgattacaatgtcatgttacaccttgcatggccatacgatgctagtctcgattttgaactatggcgttatatcaccccagcatttgttcacttttcgctcatgcatatcgcctttaatttagcgatgtggtggtatttagccagccaaacagaaaaacaactgggtacaggcaaattatttgtcattatgctcatttctgcgctatttagtaattgggcacaatcactgtttgcagaatccaactttggtggactttctggtgttgtttacgcgctaattagctatgttggcttaacaggtttgcgggccccagaaaaagggatcggcgttcctaccggcttaattgttttttccatattgtggataatcgcgggttatatgggcgttttaggtgattctatcggaaatgctgcacattttgccggcttccttatcggcttattgatggctttgtgggataatcgacatcaattatctcgtcaatcataataaaattaacatgatatttttaactttaggggacacctgtgaagcaaacacaacggcatgatgccatcatcgaactggtacgcttacaaggctatgtcagcaccgaagaattggtggaacattttgaggtcagcccacagactatccgacgtgatttaaatgaattagcggaaaagaacaaaatccaacgtcatcatggaggcgctgcattaccctctagctctgtgaatgccgcttaccacgaccgtaagatcatgtggtctgatgaaaaatcacgtattgcccaacgtgttgctagcttaattcctgatggtgcaacactatttattgatattggtactacccctgaagccgtagcccatgcactgattaaccataaaaatctgcgtatcgtcactaataatctaaatgtcgccactttattgatggataaagaagactttcgcttgatcttagcgggtggcgaagtgcgtacccgtgatggtggtattgtcggtgaagccaccctggattttatctctcaattccgccttgattacggcatcttagggataagtggtattgatatggacggatctttgttggaatttgactaccatgaagtccgcactaaacgtgccattatcgaaaattctcgttgtgttatgttagtgaccgaccactctaaatttggccgtaacgcgatggtcaatcttggtaatatgaatctgattgattaccttttcaccgaccaagagccaccatctggcattcaaaaaattattgaacaacataacgttcagcttgagctttgctaggataaccctctattaaaaagtacctttcggggtactttttcctaaaattttccgctttttttacctatttattcttttgtcaaaccccattccctttcctattcttatcaataacatcatttgttcttttcagttaataagcacactaaatgtagggatatgataataaattgttatttatatcacgcagtaatgttttttatcggttatatagttggcatttccaacaaaattcattacaattatgagcgaaaacgaacattaaagaattgtttcgcgcattcttaggaggatgttatggaaactaaagacttgattgtcatcggcggcggaataaacggcgctggaattgcggcggatgcagcaggccgaggcctttcagtattaatgctggaagctcaagacttagccagtgcaacatcttccgctagctcaaaattaattcatggtggcttacgctatttagagcattacgaattccgtttagtcagtgaagcattggctgaacgtgaagttttattgcgtttggcgcctcatatcgcatttccgatgcgtttccgtttaccgcatcaaccccatctacgcccagcatggatgatccgcattggtttattcctctatgatcacctaggcaaacgtgtcagtttaccgggcagtaaaagtattaaattcggggctaactctgtcttaaaacctgaattaactcgtggttttgaatattccgactgttgggtagatgatgctcgtttagtagtattaaatgcgcaagagatcgttcgtcgtggcggtgaagttcgtactcgtaccaaagtgacgcgcgcttggcgtgaaaacgatttatggatggtggaagcacaagatttacgcaccggagaaacttctcgctaccaagcaaaagcattagtgaatgcagccggtccttgggttaaaacattattcgatgaagggttaaaattaaaatcaccttatggtattcgcttaatcaaaggtagccatattgtgatcccacgtgctcacgatgaaccccaagcctatatcttacaaaatgaagataatcgcattgtattcgtgatcccttggatggatgagttctctattattggtaccactgatgttgaatacaaaggtgatccaaaagatgtggctattgataacaatgaagttgagtacttattaaaagtctataacgaccactttaagaaacaactgaccaaagacgatatcgtctggaattattcaggggtgcgtccattgtgtgatgacgaatccgattcgccacaagctatcactcgtgactataccttagatgtacatgatgataatggtaaaacaccactactctctgtgtttggtggtaaattaacgacttatcgtaaactcggtgaacacgcggttgataagctaaatgcttatttccctaatatgggtcaagcgtggacaaaagagggtcaattaccgggggggaacttagaaggttacgatcgtgatggctattcacgtcttattcgccaacgtcatccttggttaccagaagcattagcactacgttttgctcgcacttatggtagcaatactgaagtgttgctagaaggaattactgatttagccggaatgggcgaaaatttcggtcataatctttacgaagctgaattacgttatttagttaaacatgagtgggtgattgagcttgatgatgctatttggcgtcgtaccaaacttggtatgtggcttaatgatgaacaaaaacaacgtattacgcaatggttagaggcaaatacgcacacagcataatgcagtaaaatattctctgactctgttcaatgttcttattagcaatttttgtggcgcgataatagcgccactttttttattgccgcatatgatgctattgacattacacctgacaaactcatcgataattgcttcagctggttttgcactgtttttgcaaaaattccattaaaaccacagcattattctgtttctcatctttagcggaatacagtaacactaacggtttttctttggctaccttcaatagtggttgccaactttccggtattgcttctaattcttttatatagcgagccgtaaattgtgtgaaatcgccattttcatgaaaccattttcttaattcagtagaaggcgcgagcgctttattccattcatcataatgaaaatcgctctttttcacccctctaggccataatctatccactaatacacgataaccttcatgcttaccgtctttatcatcatagacacgtttacaagtgatcatttctactcccattcaatcaatgagttaattttattatagaagaaaatcttcaaacgtatcccttctgcgactttacgttatttaaggttgtcatcgtgcaacatgaaattttctcttcttccgattgaattatcctcattgaaactaaggtgaataactgttgactaaataaccgaattaagagaatctacatctagacgtctaaatggttagatgggtaaataagtagcgatacttaacggaataacaataacaacatgtgacacaacgattgatgaggtataggtatgagcttttatcacgcaagccagcatgaagcgcttaatcaaaatcttgctgaattagatggccagatccaagtttcttttgagttttttcctcctcgcacacaagagatggaaaatacactctggcaatcactggctcgtttaaataccttaaaacctagctttgtttcggtcacttatggtgcaaattcaggtgaacgagatagaacacatgccattattaaagatataaaagagcgtacaggccttgaggcagcaccacatttaacctgcattgatgcctgtcgtgaagaattacagcacattgcccaagactattggcaaagtggcattcgtcatattgtggcgctacggggagatttacctgataacagccagaagccagatatgtatgccgttgatctggttcgtttactgaaagatgtaggagattttgatatttcggttgctgcttatccagaagtgcatcccgaagctaaaagcgcacaggctgatcttattaatttaaaaaagaaagtggatgccggcgctaatcgagccattacacaatttttctttgatgtagaaagttacttacgctttcgtgatcgctgtgtttcaacgggtattgatgtagaaattgttccgggtattttacctgtcaccaattttaaacagttaaaacgttttgccggattaaccaatgtgaagatccccggttggatgcataaaatgtttgatggcttagataacgatccagaaactcgcgcactggttggggcttctatcgctattgatatggtgaaaattttaagccgtgagggcgtgaaagatttccatttttacactcttaaccgctctgaattgacctacgccatttgccatacattaggtgttcgcccacaacttgcgaaggtttagtcttatcaccccgcccatagtctattggcggggtttttctaggcgagattattttgcaaaatgataaggttgctcgataggaagtaagctatatgcagtatctagatcgccattagtaatacaagtatctattttacgcactttatcagtaatatcggtaatattaacaatccactcattgcaatatttttctactgcttgattacgtaaccctatttgaatagtgcgataacttaagcgattaagataaatatctcgttcaggatcccactgaatacgaatatcactggtttctgttgcttcttgccattctttggcactcacatagtggtctggatcgaaatgactgaccacaccttgtgttagcatctgttgaaagccttcatgggtaatatcaacagccaaaatagacgcttgattgggatctttgcgcccccaccctgagcgatacatcatccaaagaaaggagggttttacccaagtcatacgggtcatactaaaagggggagaaacaaaagtaccatttgcgactgcgctctgagcgatagtagtagaataggcttggtaaacacggacaaaatcatccgtataatatgcccttacttgacactcaggacatcggtcaacatcatcgttcatctttctttaatatccttttatattaataaaatggagctatctgcttaaattatgagcctctaaccagagataatcaagagtccctattttcattagggatttaatagaatatgacatcgtgacaagccatacaaaagaatgatcataaagcgcataaattaaaatggccattatcgctgcaataataaaaaatttaatcttgcaaaatatatcttacactacgtccaccagcgcccaaggcgctcaatacattgtactgattatcaaaacgactcgatcacgaaatttacattaagttctcttttattttctgatcactagcgctgactaaataattattttctcttttcttctttctttataggaagaaaggaaaatattaagcaaataatcacaaatgatactaatagtattcgaccatagaaatagggaaaaaaccgaacaatcaaaacactataaaggacaaaaaaaatagcaataatgcttaatattaaagattgtttaaggtctttttaaaaaaaaagaaaatatttttttcatacatagcctacattaaagtcgcatatctgatgatataacattcatcatatcagaagagaatgggtagccattaaccacatatatccccccaatgaggcgaatagaaagcttattctactcacaaagtgaggcgaataatcacgatatttgactcatgctcctgcaattaggcgtttgataagttgtgttttaattaatggaggcgctttcactacgttacctgctatcttagcagtcatgatttcaaaggctttttctaccaataaggtttcatcttgcttcattgaccagacattattaggtaaaaaacttaacataacgtgatcatcaaaagtacctatattgatatgtgcgggaataacaccttctgtttggcgaatagcacttaatacgccttctaaaatgggcagtgatgaggcaataaaatgactggggatctgccgatgttgttcaagatattgcttcatcatctgttcaccatctttggtggtgttatgttctgcataggaaacggttacatggctttcatcaccataatgggctttgatcgcctgaacataaccgcgcaaacgagctgcaatagtaggaagaagagcatcaccggcaaaaaagtggattggcgcatcttgctgtatcatcgctttcgttaattgtgcaccactatcacagttatcagacgccacgcaaattgcattactaacagaaaaatctctatctaagaacactaaaggcttttgacgatgtttaacgtgatgttgctgattttttcgactcgctgaaacaataaaaatcccatcaacattacgctcatccatagactttacgagcttattttcatttttaatatcaccataggtacaacttatcatcagctggcaaccaatttggtgacaatgcatctctaacttttccgctaaagcagcaaagaaggggttggacagccgaggaataaccagaccataagtatctgttttattgagttttaagcttcttgccgcatggttaacggtataaccaaaaacttcgacataatcagcaatttttttctgggtttttgcactgatccgatattgatcacctttaccattgagtactaatcgtactgtggtgatagataaattcagatcatttgcaatttgttcaactgtttttgccattaatgttccgtcattgatattgccctcattttgctaacaatgagggcggattaacctttattaagcagattgactacgccattttttccacattgattttaacccaggtccgacaataggtaacagcagtgttaatagtgcaatagcgaggaatgtcgcagtaataggtcgtgtatagagaatcgataaatccccttgagacatcattaaagcacggcgtaagttagattctgccattggcccaaggataatacctatcaccaccggagacatcgaaaaatcgagcttaatcataatataagccagtaatcctgcccccatcatcacaaaaacatcaatgatgctatggttaactgaataagcccccacactacacaacacaaagataatgggtactaatactcttcgtggtacatccatcacacgtacaaacagtttcatacacaagaagcctaagataccgagaaaaatattcgccatcattaagccgataaaaatactgttcacttcaacgggattatccgtaaataactgtggccctagcgctaatccttgcaccataaaagcccccataataatcgccgttgcgccatcaccgggaatacctaaagtcattagaggtaccatggtgccacccgtcaccgagttagcccccgcttccggtgctgaaaccccttcgggtgatccttttccaaattcttcagggtgttttgaccaacgttttgcttcgttatacgagataaaagatgaaatatctcccccagtcccaggaatagcaccaatagccgttcctatcgctgatgaacgaaaataggtaggtaaaacacgtttaaaatcgagccacgtaggtaatacacgatgaatacgggcattaattttctcgcttttcttctgcttgcgctcacgatactcttcttcaaagctaatcaagccttgagaaaatgcaaagagtcccacgaggattggaataaacgagacgccccccataagatacacggtatcaaacgtaaaacgtggccctgctgtcataggatcaagcccgatagtggcaattgcaagaccaatcgcgccccccattaatcctttcacaatcgattgcgatgatacactggtaataatacttatgccaaataccgcaagagcaaaatattcagcagcagagaatcccgtcgccacttttgccaattgaggagcaataacaattaaagcgatagtactaaatacaccaccaaacatcgaccccatggttgataagcctaatgctcgccctgcttcaccttttttagccatcggatagccatctaagacggtggctgcagatgcaggtgtgcccggtgtactaattaatatcgcggtaatggagccaccataaacagccccacaatacattcccaataataataagatccccgtcattccttgaaaggagtaagtcagtgggagtaacagtgcaatgcccatattcactgttaaacccggtaatgcgccgataataatccccgcgaaaacccctaacaggatcattgttatcgtttctaaactaaaaacgaccattaaagcatctaaaatttccataccaaggctcctttaccgcttactcaaaaaagacagaggttggcagaggtgaattaaaaataatgtcaaagaaaacataaaccgcggctacaatcacaatcgggatcaccaccatggcaataggtttcctctcattcatcaaccacataatgattgggataagaagcaatgatggaacaataaagccaaatagatataaacctgttgcatatagcagcataaaaatgcctaagccataagcacgcttaactgcggtcgaacttaaatctacggactggtgtacatgtttaattttatcaaccacgacacctatccattgaaaaatccccagtaaaataaataagatggctaaaccgtaaggccaaaaacgctccccaggtacaccatattcatcaaacatactcatatcacgggagagatagataataagtagcccaaaagctactgaaatcgcaccgatgattgtattgattttagtcatgtcgggatctccccgaccctatccgacttgcggatagggtggtttattatagaaaggttattttttcagggtggctgagattaattcagcatacatctcatgatcttctttcatcatttgatacgcatcgtcaccgacgataaatactggcataataccttgttttttcaatgcttcttgatattctggtttttgaaccacttctgaaaatgcccccactaactcatttttaacgttatcaggcacacctgctgttgtggctaatacagcccatgcgcgcattttcacgttggtatcgagatttaaggcttctttaaaggttggaacatccggaataagtgggaaacgacgttcatccatcacaccgagaacacgcaagatacccgcatcaacttgtgatttaaccgcaccgggtgtggttaatacgccatcgatatgatcgcccactaatgcagcaatagaggggcctgtaccttcgttataaggaatatgattaaacttagttcccgtagtacgttcgatattcacccccgcgaggtgataaatagctcccatacctgagttaccaatttttaatttaccagggttcgcttttgctccggcaataaattcttccaatgttttataaggtgaattagcattcaccacgagcacaaccggatcagcaatcgttgtcgcaatcggggtaaagtctttataggtcacgggtgacttaccttgatgtgggaacatcgctaattcaaccgtcgtcatgactaatttagtgccatcaggacgcgcatttgccacttcaattaacccagttaaaccattacctgcgggtttattaaccggtacaaagatacgccctgctggcatcacatctttagcaaattcaatgatagtccgtgcagaagtatcagtacctccccccgggttttttgggataaccacatcaatatttttagtaggatacgttaactgttgggctacagcattccccatgcccaatgtcatcgtaagcgccaacgctgcgagtagactctttttcataaaaccctttctccacatttttattgagtagctattaactgctgataaacaatgttttttctgttccaagtaaaagtcacatgtagggtattgttttcagcaataatagccggatatgaaaattcgccttccccatcgagtaaatcgaatggttcagaccaagtactgccattatcggatgaaagactgacagagataggataacgacgactccagttgcctgaattcgggttatataccaatgccaacagaccatctgcgaaggagacgacatcaatgccgctattattatttggtaaggttgttgcataagccggacaccaactgcgcccataatccgttgaatcgctacgataaattttaccgcgcgtactgcgcatcatggcatgcacatgtccaggctgagatccccatagtgttggttgtatcacgccatcccattgaaaaacacgttgtagatcagtctcccacaaggcatcgtcctttagcccttgccagatttcatgctccgcttgccctccttgatgatgggcaatcggaatatccactcgctgccagtgttgaccattgtcgctagaaatatcgacaaacgcatcccagtatcgatcatcctccaccgaccccggtgctaaccactcgccgtttgacatcactaatactttgtttttcacaggacctctaggtgttacatcacccgaaaccaattcacttggtaaactccagctatttccgccatccttcgagataacgtattgggtcgtccaactatgtacatcaggacccgttttataaaacagccagatattacctgttgatgggtcaacatgtaaaactggattccagtgcgcaacacctggatttttaaccacaggttgagcgggttgccaatcatttccctcttttatcgccaaccagatagcggtattaccgctaccctctttatcgccagcaaaaaaagcggttaataaacgctcagagttaggcacacgcacaatcgttgaagcatggcagtgattaaaaagtgaatgtgcattatccagcacaaactgggtttccttcatcacgaaaggcatattcctactcctgtgtcctaaattaatttaacgaaagccacttcttcatattttcacccaatgccgtcatgctattaacagcagaagggaaaaatgagttttcaaactgactactattacgagagcggcaaaccagtgtcgcgaaattgccgatcaggcgctgatgatatttagcgcaggcaggataatccagcgtttcagtcatcgcagctgttgataaataatcagctaatagcgcagcttgctctggtttatcctgccaattttcatacagccagacataaagttcggggtggaagttagccataacaccactatatgcttggcatcctgcttggaatgacgctaataaggtttgactattagcattggctagatgcaaacgacttccttttgataatgctaagcgacgttctatgagaggaagagaacagcaagtatctttaataaaggtaaagcgattactttgtgcgcaccactctactatctcttcagataacaagcgtttgtaaggataagggcattcataaatacccaaatcaatctctttaggtacagcatgggttaaggattgtagcgtttccagcgccttatcatcagactcgcccacttgcgctaagcgattactgatcataataacaccatcaacgccggtactcgccattgcctgcagttgttctttttgctggcttaaggccgttgccgtatggccagaagcaacaacaggtactcttccatctgctttttcaacgataaaacaggtgagtgcttgtgtttcttcatcactcaaataaaacatttcgcttgattggcaggcggcaaataacccatgtacgcccgcatcgatataccaatcgacaaggcgctctaatgacgcccaatcaatctctcctttagtatcaaaaggagtgagcatcacaggccaaacaccaacgtatttttgctgactcattataaattccttacagtaagttaatggcatcacctgccactttcacttgaataccttgagtcagtgcttgagcaacaaaggcttgtagcacaaacgccaatttatcgtcatcaacataagccactgtaatatggttactttgatgtcccgccataagatcatcacgagttacaccatctaaagtacagttgagtaatggccattcgtagttagtggctcgacggcgacgttcaaactctgcctccggtaattccaccgccatacctgtaccaatatgcataatcacatctgtaccttgatagtgtgcacgtgcccataacaaacgccctgctttaccttgacccgctatagttgatccccctttagggaaaaacatagctggctgacggtaacctgttgcgcctttgatcccacctttaaggtgttcaaaaggcacagagccggaaatttccatatcccagtagaaggttccctgatactcactcccccaacgaatatcgtgtaatgttgtttctgcaggcaagcctaacgaggttaataaacgccataacatcgtttgtggaatagctgtacccatatcgacttcgttgatacaagggatcggtgtgttagggctgataatgtcgccattttcatccggtaacgggaagcgtgccgttgacccaattgcaccttcggcaaaatcagaggcaggacaacaatcttttaatccttgctgatattgcacgcctacagcggttaagccaaagcgtttaacgaaacgcgccattgcaatcatcatggcacactgctctttcacctgttcacgagtcagttcagttttatcatctgtaccaaacttaaacgtcatgccattattttcgtaccattgcacacactcttctcttaatgcatcaggtacttttgccatttcgaccaataatgcagattgagagagtgattcaatgggcataccaatatcgatcattgcctgttgtgggaagaccccattaatcattcccatacagaatgtatcgaacaaacctattatttctttatttttaattatatattcgccgacttttcgacccacttcgccagcttctgtcgccattaccctgtgtgttggcgcaacttctttaagatagctaagctgatgatttacataaccatatttcaaccatgttgctaagccatcaataaaaaatgtatcgtcaaaattttctgaccataagcgtgaataatttttacctaaactggttaacgtccccgctaaacacaacatgccaactagccccggccatgtaccatcaaaattagccagcaacagaattggcccgcgatgatgcgctaatgaagaggcaatatggtgtgagtattgccatgcggttaatagcacaataacgggtgcatcaggatcgatagccgcaaacatatcgcaaccttcacgctgactactgataaaaccatggcctcgtgcttcatcaattttatgtgcacgtttcatggtgtaaccttgtgcttttaatgcagcggctagcttatcttcaaattttttctgcacaggccagcatgttacgtttgcaggctcacgtaagtctgcgttagtgaccatcaggatctcattagcttctgcactgataacgtccggtaattttggtagatttaagttcaacataagatatccctggtaaggtaaactcgattcataatcggaaaaatttatggtcagcaatctgccatcatgtcgttatagcgctgctgatcttgatacatctgtaaataaacttggtatttcgcttgatggaaagcaaaggtgtcactatcgggtgtaataacaccaccttctcgtaccatggtatttgctgcttgagaaaaattatcaaaggctttacatgccacggcgcctaataaagcagcccctagattcaccgcatcttcttcttgcgctaaatggatctcacgacctgttgcattggcatattcacgtaaccacagtggatttttggtcgctcccccacacataacaaggcgattaatttggtgccctgcatcttcaagggtgtcaataatatggcgagtgccataggcaatagactgcaatgtcgcaagataataacgagccaaggcaacccgaccactttcaagggttaatccactgaccattcctttggcggcaggattagcacgtggagagcgattgccatgatggtcagctaaaacatgaaattgtgctgttggataaggttcattttcttccaattcagcgacggcttggtttaataaggtatagtaactaacacttttttctttcgcttcttgttctaactcagcccatgactcatggcggcggatagaccattcaacgagcgcaccggcagcactttgccccccttcgtttagccataactctggtaacattgcgccaaagtaaggcccccacaccccgggcaccataatcgggtattggctgacaatcatatggcagttagatgtaccactgataatggccaaacttccctcaggttgtgatgcggttaacgccaacccacccgcatgagcatcaataatgccactagcaactatgacgccagtatgtaatccaaaagcctcagccacagaggtcgttaaacatccggccgattcacctaaagccaaaatggtttgtggtactttttctaataattcatccaaacctacatcagctaacaagctttcactaaaatgcccttggtgtgccaaatagttccatttacacgttaatgtacagatactggcaacatcagcagtggttgctttccacactaaaaaatcagctaagtcaaagaatcgccagacatgtttataacgctccggatagtgattttttaaccatagaattttaggcaattccatttcaatgctcacttcgcccccgacataccgcaaaacgggatcgttagtcagattaatggtcactgtttcttgtactgcccggtgatccatccacataataatatcctgctcaggtttattactgggtgaaaccgaaagtgcttgcccttctttaccaacggccactaaagagcaggtggcatcaaaaccaatagacttcacatggagaggatcgatggctgataatttcaccgactcttttacagtggtgcatacttgttgccaaatatcagcggaagattgctcgacaaaatccgttttcgggcgaaattgtgcaattggacgcactgaaaagcccagacgctttccaaagctatcaaatactgctgcacggacactggctgagccaacatcaacgccaataaaatattgttgttccatgcgaaccctcatcatttgctaacgctatgctaatttttgctacttcgagttagcaagttaattcgagcatggagaaaaaacaatcacaataggattggtttgtgatgcagatctacatcaataatttaatacattgatttagaaagaaatttatttatttcactttgttcaccattttaatagcgaactgaaacgattatgttcgttataaaacaaacgaacatttagctatcaatgagaataaaaaccgtagttaacatattaatatcactatcaatataggatgttattaaaatatacctaactaatagtaaaatttatttttaaaaagagtaatatattaaaaataaccatttttctatttttatcatattcaatcatttatttttaatagactaatctttagttatatattcatttttggagtattaaattatgttgaaaaatattgctatcagtctttctttacttcttatcacttcttcggctttttcagccacactggtagaaagagaattacaacagaaatttgaagaaaatattcaatcccgtgttgtagacttaaataaaagctgtgatgctaatataaaagttgcgtttgattggtcggcatttactgttgaggatctaaaaacaacaggtattgatggttattgcagtgaagggttaaaaggtgtcattaatacctgtgaaagctcgaaaatagcacaagaaaccgtaaaagagaaaatacagaatattacctgctctaaagcgtcacctcgtagtattgaacttaaagatgggacactgaattttggtattgattttaatgctgcaaatgatgccaacgctattcaaacgcatttaatgaataatctctaaatagagtaaatacagcaagcaatgatgcgataatacattattgcttgttgattaaataacagattgaattaattttttagcataaggatgagtaacagtacttaatttatttatctcgcataattcaatttgttgaccttgtaaaataaacatgactttatcgcaaaaataagtcactgtttgaatatcatgactaataaaaagataggataattggagttcctcttttaataattttaataaatccaatatttcaacttgtgtaggtatatcgagagagcttattgcctcatctaaaataattagttgtgggtaagatgctaacgcacgacataagcaaactcgttgagcttgcccaccagacaattcaaaaatataacgctgataacaacttttaggtaattgcaccttctctaaaaaagaaaaaataattgtttctaactcgttatgacggagagtcggattaatcagtttaataggttcagcaatcatttcacccactgtaaaagtcggattgactgaagcgatatgatcctgaaacacaatacttattacaccttgtcgataacatcgtttcgtcactggcttatcatttaaataaatagccccttgatcaggtaattctaagccactgattaaccgtgcaagggtactttttccactgccactttctccaactaacccgaaagcttcacccttttgtatattaaaagagagcgcatcgagaatagtcactttttctttaaaaaagcgcgcccctttttgataataatatttactgacgttgtctactcgtaatagcattcgatcctcttgttgtttatcgccgtttcatgctgatcaccgagcataaagcacctgtgcaaaacgttgggaaagcttagctctagcctcaattaaataacgggtataggcttgcttaggtgtatctaatacgctgtttttgtcaccaaactcgattaattttccctctttcatcactaaaatatcatcagcaatctgactgactaatcctagatcatgggagataaaaattaaggtggtgtttttagatatcgtgatacgttgcaatagctgtaatatttctctgcgcaagggagcgtctaatgcggtagtaggttcatcagcaattaataaccttggtgataacgccaaagccatggcaatcatcacacgttgtaattgccccccacttaattggtgaggaaatgcctgcataatcattaaagattgatgctcaaacacctcatccaatgcttgtttagtggcattgaatgcttgtaatttagtataagaaaaatggtaaattaaagtttggctaacttgcttgcctatttttatcaacggatcaaaagcactcatgccgttttgcacaatcatacctagcgatgtccctaatagggcacgccgttgttgctctgaatataaatgaaggggcttttcatcaaaaaaaatttctcccgatagtgcaagtgtacttggaagtaagccaataatggctttactgattaagcttttaccactaccactctcaccgacaatagctaacgttcgcccctgtttaaggctaaaggagagattatctacccgctttttttcgctgtgaggatcatagattgagacttgattaagcgtcagtaaattgttcatatttatccccgactgattgacgattatcggggtcgaacacatcgcgtaaaaaatcgccccaaaagttaaatgcagtaacaacaaccgtaatcgctatccccgcaggtagcatttgttcgggatgtaataccatgacattttttgcttcactcagcatattaccccattctggggtgggtggctgtacccctaaccccagaaatgaaagagcagagatcattaaaataacactaccaatatcacttgaggctaaaacgatagtttcagctaatgtcacgggtaataaatggcgtcgtaaaatatgtgttggtggtgcgccaatcacttgagcataagcaatatagtgacgatgtgaatattgtcgaacaatgcctcgtatcattctggcgtaccaagcccatttaaccaagatcaccgcaatcaagatgttacctattccaggccccattatgcccactaaggctaagatcataatttccgcaggaaatgacaataccacatcacataaacgcataatcactgtatccgttttaccgtgaaaatagcccgccaacatccccattagccaaccgatcagcagtgttatacccatcgcatatatggcataaaaaacggtggttcgaataccaaagagtaaacgtgaaaacacacaacgccctaaattatctgtacccagtggatagtgaaagctgattggctgaaattttaagcgtatcgatgttaaagtgggatcatgaggtgcaaaccaaggtgcgcctattccggcgatggtaataataaccatcaccaataaacagagttgtgcacttttatcttgcgcaagtcgttgccagaataaccgccacattgttaccgccttagacgaggatcgactttcatctgaatgatatctatcagaaagttaaaaaagagaaataacaatgacatcattaaaatataagcttgtatcatcggataatcgcgtccaaatatggcactaatacacagtcgccccaccccaggccatgcaaaaatattctcgatcacgaccgtgcccgcgataagtttcggaatactcattcctagcgccgtcagcgcagaagcgagtgaattacgtaatatatggcgacgcaaaatcagcttatcaggtaatcctcttgttcgggcataaaatacataaggctgatgccattgattaagcattgcgccccgtaacaaacgtaaataagtgccgatataacctaaagagagtgcaaatgccggtaaaatgaccgattgtggtgtcaacataccactgacaggtaaccaatctaaatgaaccgccaccgcccaaattaacaacaaccctaaccaataattaggaattgcggttaacacaaaaacaatcagccgaatacttttgtctatcaagctatgtggttttgccacacaccataaggctaaaggtaacgcgataataagcgtaaataataatgcggtagccgctaaccaaagcgtgggggggagagcagttaacatctcttgtatcaccggttttcgggtcaaaaaagaggtgccaaaatccagttgaaatcccgctacaagccataaaaagtagcgtgtgaaaaaaggcttatctaaaccaagctcacggcgcataccttcaatcgcttcgggcgtcggtacaatttcgttaacacgcaaagccacttctgccggatcagacggtgctaaattcagcaaaacaaaggcaataaacgaaataatcaatactagcggcaatatcgccaataggcgccaacatagataacgtaacatctgctttaaccaatatggcaccggatcagtgccatattgaagtaacctcttaaattaatcggttattcggctttaaaacgcatcttttcaaaaggtatttcatattgagatggattaaaaccaacgttttccaattcactacggtaaatcgctttagtacgcgaataggttaatggtatatagacggcttgctccgctaatgaggtaaataagcgttgatataatgtctgacggcgatgttcatctggcgtaatcaacaactcgccaatcatcgcatctaattgtgctttattggctaaccctttctgtccctggtaatcagcatgagctggaattctaaaggatgagacaaaagaggcgggatcgtaaggtgttccccacgaaagagaatactgtaaatcgaaatcaccacttttctgtctatctaaaaaggcctgtttctcttcccctaataccgtcagtgccacgccaattttcttaaaatcatcttgcaatagttcggctatctctttttcaaccgcattattcacattataagagagcaataactgcaacggttttccctgtttttcacgcactgttttacccgcaggtaatagccagccttcctcttctaataacgaggcagctttttccggttgataaatataagttggtgaatcaaaatcgcaataaggtacacttcttgccattaatgtatcagcgactttttcacttcccgctaaaataccttgagcaatcccttctttatcaacggcatactctaatgcttggcgtactttttggcttgaagtaatagggcgactactgttgagcacaatagcacgagaagcaataggtgcactcatttgtgttttaaatttatcagatgccattaatgcgtcaaaagagtccatatctaacatgtcgccatctgcaccaaaaattagctgaatatctcctttttgtaaggataatagcattgtctgtctatcggggatcactcgccacatcaccccagttaatgctggtttttgcccccaataatgagggttaaccttaaattcagcatattgatctttcttatgttccgtgagcacccaaggccccgtaccaatataatgactcacccctgttttagttttaccgttaataaatgatttaggtgaaataaaacgaaatgggcgagttaagccaagttcagttaaggttggataatagggattttttaaatttagcttaacagtatactgatcgataacctcgacactgtcgatttgacgtaccaattctagccatgcatgacgctgataattatctaatacagcctcaatattaagttttaccgcttgcgcattaaaaggttcgccatcactaaatgtaacgtcttggcgcaagaaaaaggtataacttttaccatcaggagaaatttcccagcgttgtgctaaataaggtgcaacccccttatcggtatttaaaaccaaaggttcaaataccatgttttgtgcggccatttcaccggaataaagatgggggttaatatcacggatatcttttgtactggcataatccaatatattattactttgattggcaaaagcaggaaatacgcacgccaatgttaataatagtgtaggaataactgtaaatagaggtttcacattattttccttttatcattctcatcgattatttttctgagcatggatcataaacataggggttgagccgtaattaattttttcttcttcatcccaaacgtgatcaccaatacgaatatccacgctataacgaataaaaccgatatctagtagtgtattaatatcccactgtggacgcttaacttggcttaatggtaattggcgagcaattctttccatctcttttgtatcagtattaacatagtgatcagcaacttgcttttgcgccgctcgctctctatcagcaagaaaaccttgccaatattcatcatcaaacagatgtaaataccaattggcatcaaaattaattaagcttcccccaggttttaatacgcgaaaccactcttgataagcctcacagggtgattttaaattccatgtcacattacggctgacgaccaaatcaaattgttcatcgccaaagggaagatcttgcacatcaccacaaacaaagttaatagaaacattatgttggctggcgttatttttagcctcaagcaacatccctggcgtggcgtcaattgcagtgacttggtggcccgacaacgctaataaaatagcaaagaatcccggccccgtaccgatatcaagaacctttaatgtctccccttctttgacatggcttaacaataactgacgccatttttgctgtttttcacttaataactcttgctggttggcagcactatagctttcagcgcggatattccagtaacgggtcacatcatgaagtaattggttattatcgattttatttgtcatcaaaaacctgctgttgtatcaacataagagaggtaaaaattccctaaacgagaaaaagaaggggattgtgtgtcttcgtcagccaccttaccttttagtttcgagatcctccatgtgctatatcaatgatttttagctctccaaaggcaagctggctttcgttgactcacatcgatttttaccgaaacgcgttatcgtaaggtgtaaaatggataccaagcaaacagaatttaggctaatactgacgatagagaagatctagaaacaatttgcgcagatagcttaataaccgctattacgtcgcccaaatagtgttcttattaaggataaaaaatagcggccttgatttcttcttgcacacaaaagcgctatagtgattagatagtcatgttgattgataattttcttttcgctatcaataaaggcactctcatatggatctcatttcacgattaacaaccaataccactcgtgctgattttgccttagctcatcaacagcaattaatacagttactgatacaacactttcctgccaaatatcacaccttatttgcaaccccgcaaaaaactgcagaagatactattgaatggtatggtgaaatatccggtcagccagtggcattaaatgcattgtcagagcaacaacgccaagagataagagatgctctcgatgatgatttaaaaaatcttaaagagcaaacggcattacttgcttcacagcaacgcattaccgatgaagagcgccatctgcttgataccgcctcaaccctacccgatgcagagagcatctatatcattaatggaaaacccattattacttggtggcctcgtaccacacctttagcgccgactgttgcacaagtcactgctggctctagtgcagcagctgccggagcggcgcttgcaaaaatatcaccaaaaactcgccaccgttggttacgttggttactggtattattattggttttaattgccttagtctcatggttaagaggatgttttgatatcaatacaacgccttctatcaataatacttcagcgaccgctgtcgcaactcactctacctcaacgatgacagctacaactaatacgactaataagcaagataacctaacaacaaataaataactaaggtattaaataaaataaaaaatagcgttttatattgatataaacgctatttatttataaaaacaaacacgccaataaattattatttttatataaaaaaaacctattttatctcatttatctttttttattccaatttaaacaattgtcattactataattcaccattctaaatagtaagcaaatgggatattaaaaatgaaaaaacaactattatcagcattatttatcagtggaatattttctatttctaccgttcaagcacatgaaaatacctcattagataaaacaacaatttctgcaggttatgcacaaataaaaattgccggccaatcaggcattatgcgcggtggtaatctctctatacgtcaagaattcaatcaacagctaggtattatggcaattgctacctatgcgcaaaatgaatatgatttaaataagcctttaaaacaattaataaaagatgttgatgcccgctattattcagtgatggcggggccaaccttgcgcctcaatgactatattagtgtatatggtgtggcaggtatggctcaaatcgaatttaaaggtttagatactagacaagtacctgaaagtataatcaagaaaaatgcttttagctggggagccggtgttaccattaaccctatcgatatgctttctgtttccgttggctatgaaaacagccgttataaaatgaataaattaagtgataataaattaattattgatggctttattgcaaatattggttatagcttctaattattgatttaattaaattataaaaaaagcctctgtcattatcaataacagaggcaaattatttcacagacacactctgggatatttttaaaatacgagataatattattaaattaaatcttgataagtacctaattgatatccacgctcagcaatcgcttgttttaacgatgattgcgtcaacacctctaattccgttaaacgttggaaacagtaaccactcacacgtaaaggattatcaataaaagcaggatgtgtcatcacttcaagtgattgttcaccacgtgctttagcgtcatccagtgtctttaaaaacaaggcttggctgatttcatcaccatagaattgactatcaaaaccatcactactaataaccccttgagtattaagattttctttttgtgccaacagtctatcaacacgtatcggtaatgctttttgttgtgcaaactctgccacgatggggaaaatttgtttaaacatatgcacgtgatgatggctgtctatatggtcggggggacaaccaaacaactcaacaaagcgctgatattgtgcattaagctccactcgtatctcatctaaaggtaactgctcttgctctgccatttgccatagccatttacctaacaccccattacgcgttaaagaagggataggagacagcggctgtcccatagtcaatgtaaaatggagcccgacaccgagatgaggtagctccttgcataattgtgccgcatgctcaataccttcagcattcaccaacgccgtcgttgatgtcactatgccatgacgatgacattcaacaatgccataattttgccctctactcagcccaaaatcatcggcattgacaattaacaagtgtgccattctgtctcctttttatgatttattgagtctaaatcacttagtttgatgctgctaattgtgcaatcgcatgagcaaaattaggtaaatgcgctttgtgtgctaataacatctcacgagtcagtacttcagcatctttatcggaaagtaccagcggcgttaaattcatcgcaagtaatgcatcattaaactcaccactaatagccgcttgactggctgcgatctcaaaccctttgatagtatgaataagccccagcactttttcatcaaaatgggttaaacgtggatgtggtttggctccgtctttacctaaaatagccgtcacttcaattgcccagtctgcagggatattatcaatatgaccgtaatgaggaatattgacgtaatgttccgcctgtttatcgttataaatcgcattaatcacttcacaagcagcatcagaataataagcccctccacgtaattccaactctttaggtttaatatttaaatgtggatctttatacaattcaaacagttgtttttcgacttgctgaacaaccttagccctagcaccacctttatagtattcccccatttcaatggctaacatctctttttgtttaaagtagtagagtaaataagagcatggcaacagattaagagaacgaattagcccctcactaaaaggtaaatcaaaaatatttttcaccgatcctgcggttaacgtccccgaagcaactccttctaataattcagggaaacgggattgaccgttaacaatcacatctttaataaacaccatatgatttaagccaaacagatcaatagaaagcgtatcttgctccgttagcttaagcacatcagtaataaacattttcataccgataggaatattacaaacaccaataaatctcttaaaattggtatggcgataaaccgcttccgtcaccatacctgcagggttagtaaagtttatgatccacgcattagggcaaatttcttcaacatctttaataatgtcaaaaataaccggaatagtacgtaatcctttaaatagcccaccggcaccattggtctcttggcctaaataaccatggcttaacggaatggcttcatccaattctcttgcttttaattgaccaactcgcaactgtgtagtgacgaaatcagcctcttttaatgcctcacgacgatcaagtgttttataaatggttaaagggatacccgctttttttatcatacgctggcaaagcgcaaaaataatatccagtttttctttgccttcttcaacatcaaccaaccataattccgtgatcggcaattcatgataacgtttaataaatccttctaataattcaggtgtataactacttcctccaccaatggtgaccacttttaacttatgactcataaaatactcccatacagcacaatcatgctgttatttgtctattaatggcaaaattaaggcgtaaaaatccctaaagaaaataacgttattttcttctttctctctctatttaataaaaatcaattgatattattgattactttttacgcttaattataaattagttagtctctttaatactgtataaattctttctataactatttggtgtgagcgatgttatcttcttaaaagtcttaataaataagctcgggctactataacctgcatcaaaagcaatatcggtgacggagtaattcgtaatttctaattgttttttagcaaaattaattcgaatatcatgaataatttgcatcggcgttttatcataataacggcgagttgctcgagttaaatactcttgcgattttccagataattgcaccatatttgccaatgcattttccccaaatcggcttttatcatgcattccatcaatggcgtcttttagccataagggaatatcatcttcaataccatcatctctataatgtcgtaatctattcaccacattaaaggtgacaatttcaataaattcattaaattctgtatgtctgaaatttaatgagctaatcacggattcaatataagaaagaaactcattttttaatgcataaacttgagaagcaacaaaataagcgggcaataaaggaagataatgtttatcaaaaaaagctttgcttattcccacatttaaaatacgagttacaccaaagtcataaaaactttgatgatgcgagccaataggaataaagacaaaatcaccacgctctaataacacctttttaccgttaatttcttgataatagcgccctgttaaaacaatagtaaattcataataatcatgctgatgcaacccactgacgctttctgttttgttataaataaacacatgaaaattcttaccattaaataattggttttcatataccatgcgtatttcagcttgcgcttttaatgagtgcatcatcattcgccttactttattttttcatgtaactcgataagctctgtgacaagctctctggctaacatagatgtcattaaatgatcttgagcatgcaccagtaccaagctcactttcgttttacccaatccttgatcatcaccaattaagcgggtctgtattttatgagcttcatttaatgctgctcgagattgttccatcattttcttggcttgtgcaaaatcaccttgcttcgctttttttaacgctgcataagcgatacttcgtgcttgccctgaattaataattaaccccatgataatttcttcaaattcatcatctgtcgctgagctatcaacgcaattctcaatatctaacatcattccccctctttggtgcttagctgtgcaaaataagcgctgcacagccattgtctattcgttaaaatttcaatgcattagcaatatcttcttcactttcttctttatcaatttcggtttgtgctttattcgaaataatcacaaaaggcagataaatcagtgttgcaacagctaagttaaagagtgctaataacagtgcggcaatactgccattggtattaaaaaatgcccctaaccctgttggcatcgtccaaggtgcaatatttgtgaccggcggaataatcccaaggtaataagcggttacggtaatagcagcaaggattggctgaataagaataaaaggaataaacatcactggattcataatcacaggtaaaccaaaaataataggttcattaatttggaatagacccgcaggtaatgctaacttcgccacttgacggtgatctgctcgacgcgatgcaataaagatagctaatatcagacctaacgtcgcccctgttcctcctaagaagataaacgaatctagcatcggttttgcccaaagatggaacgttttgcctgcagcaagtgccgcctcaactgaaccatactcggtataaatagagacgttttctaatgcccaaggtgtcataataccgctatcaagtgccgccagcgccagtgaaccatgaataccaaagaaccacagcaaagaggtaaaaataacgtaagcccacccaacaactgatcctaacgaagccaatggcgttgaaatagaatctaaaatgatttgatggaaatgtgtaccgtaatgcgctaatccccaagagataattcccataattgataaaataataaaaccaggaattaaggcagaaaaagagcgcgaaacggaggcaggtacactatcgggcaaacggataacccaattacgacgcactataaaggtaaacatttcggcaaccacaaggccaataataatccctgagataatattggcacctcctaaccagttcgcccccacagcataagcgccaccagcgtcataaggtgttaccgtcataaaggcggcgatagaaagtaatcccgccgcaatagggtcgacttttctctcttccgccaacgccataccaataaagaacggcgccatcaatgacattattcccaacgtaccgttatagacattaccacctatggctttgaaaccattaagtgtttcaattgttgaggcatctaaacgaataccaagagagtaaaaaaaggagccctcaccaaaactgagaaaaacattattgataagtacaaacattgccccggcaagtgttaatggcattaaacggataaaaccattttttatcgcattaacatgaggttgctttccaattttaaccgcaaaaggaaggagtaccttttcaagtgaaccaatgactttactcatagaaaaatacccttaaaatgccgctaattgctcggctagctgaaaaattcactctttgactggaataaataaaaataacaataaaaaaattaattagttgttgctgatgctttcttaatggcggctactgctgcttttaatacacctaatccatccactttcccatataacaatgaatcaatgacttcgacaggtttattgggtaataatttttgaatatcagcgagcatccaaccaatttgtggccccaataaaacgacatccgcttcttggcctttttgctctgctaatgtttctggaaaagcttcaataataacgggtacatcatatttttctgcttgtgcacgcatttttgtcactaacagagatgttgacatgccagcagaacaaaatagataaatatatttcttttgcataaaaccctctcaaattggccacactctgccctagagataatgctactttctcatgtgcattgattaagatgtcagtacagaattaaagtaaaatttagcaattaagattgtttctgattgaataaagtatacgcaatgatactcactaacgatattttttactgacacataattgtctctgattgacctagtgtattgaccctcttcacaaattaagcaaaaaatctttagcattgtttcgcgttacaaaatttgtccattcttctcttcacatgatctgatgcaaagattcagcacaataatataagttaatcctttattattgtgagaatgtgaattagtatcattactctttagttttttggtataatcattgtttcctttgtgaagctcattattaggtcacagctagtaaactgtgctatttcatatcgcaacaatatgggaaagagaatgtttaaaaaatcattaagcccactgttcttattgctgtcttctctggttatcgcaggttgtgataacgcacaagatacctcaacaacgcaatccacagagaaacaaactctcactatcgaacatgctcaaggcaccactgagatccctgctcacccacaaaaagtggttgtgatgaacatggaaacacttgatattattgatgctcttggcgtacctgttgttggcctaccacaaacaaacgtccacttacctaaatttctagagaaatacaccaacgaaaatgagtacatcaacgaaggtggcctgtttgaaccaaactacgaaaaactcagtactactgcccctgatctgattttaacgggtagtcgtgctcgcgatgcatatgccaaattaagtgaaatcgcaccatccatttctatggatatcgacagcacacgctttattgacagcctcactgagcgtacaacgactttaggtcaaatttttggtaaagaagaacaagctaaaaaattattagctgacttcaatagcaaaattgatacggtaaaagcaaaaaccccagatgcgggtaaagcaatggtcgtattagtcagtggcggtaaaatttccgcttatggcccaggctctcgctttggttttatctacgatgtattgggctttgaacctgcatatactttcgatagcccaggctctcacggtaatattgttaactcagaactactgctaaaacttaatccagactggatgtttgtcattgaccgtgatgcagcaattggtcgtgaagattcacaacctgcaaaacaagtgcttgataatgccctagttagaaaggttaatgcatggaataaagaccaaattatctatcttgatgccagctcgatttatatctcaggtgggatacaaacttactctcgcttaatggatacaattaatcaggcgttggatcaaaaaaaataaagtaactgaatgaaaacgttccatttatcattggggataggacttatcgctatcctctcaatgatcagtctatttatcggcgcaggagatatcactcctgcttcgctttttactgatcccgatatgcgcgatatcttctttattagtcgcgtaccaagaaccctgtcattattacttgctgggggcgcaattagtgttgctggtttaatcatgcaactgctcacgcaaaaccgctttgttgagccttctcttgcaggtacaacacaatcagccagtctcggtttattagtcgtgatgttgcttttccccgcggcaggcattttcaccaaaatgatggtagccactgtttttgcacttttaggcactgtgttatttatgttgttgctacagagaattgccttaaagaccgcattaatcgtgccacttgtcggtattatgctaagtgcagtgataggtgctctaaccatctttcttgccgtctattttgatttactacaatcactagatgcgtggactagcggagacttctccagtgtcttacaaggtcgttatgagctgctatggcttgtcggtgcccttgcattaatggcgtgttgggtcgcggatagctttaccgtggcaggtatgggacgtgaattttccatcaacgttggacttaactatcgtaaagtgatgattatcggtttatctattatcgctttaattagtggtgtggtggtgtctgttgttggtgctctacctttccttggtttgatcgtgccaaatttagttagcctagtgatgggagataatattcgcaaaaccatcccgtgggtatgcttaagcggtggagccattgttttactctgtgatgtgattggtcgcctgatccgttatccatttgagatccccgcaagtgtcattttaggggcggtaggtgctgtgatcttccttttcttactactgaagcagcaacgttatgcaaaaagttaattcatccatgattagcaaatatactggcgctgttcaacctaagaaagtgcgcctctcacctatggcgcgtatttggctcttacttggcgtctcattattagccattgcgctgtttatgacgatcaacctaaacggtaatatctcttatattctgacacaccgcgcttatattattctgacgatgatcatcgtcgcctttgcggcaggcgtttctactatactgtttcagactatcgccaataaccgcattcttactccttcattaatgggcttagaagctctgtttgtattgctacaaacgctctttatcttttttgaaggggatatgcccgcctcttggatggccaatctgacgaagttctttttagagtcggccttattagtgttattttcggtggttctatatcgttggctatttagttcagtacgctttaatatcaatttagtccttatgattggtattattttaggcaccctatttcgtagcagtgcaacgctattacaacgcctcatggacccaaatgagttttctgtcttacaaagccgtatgtttgcgacatttactcgagccactcctgatcttatcttatgtgcattagccattattgtcgtcgtcggcgtattactttggcgtatgcgttatagttttgatgtgatggccttaggtcaggcgaatgcgattaatcttggtattaattatcgtaagcaaacgacttatattctattacttatctctgttctggttgcggtatcaacagcattagtagggccgttgacatttttaggcttaattgttgctaatctggcttatcatattagtggtagcagtcagcaccgctttttaatgcctgtggcattcttattaggcactatcgcactgattggcggacaattgattttagagtatggcttaaaaatgacaggtactctctctgttgtgattgagtttattggtggtatgttctttatttatttggtattaagaagactttaatatgattgaaatcagtaagatatcaaaacgttatcaagacacaacagtgctcgataatattacaacaaccattcaacgtggcggtattacttcaatcatcggacccaatggtgcgggtaaatccaccttactttctgtaataggccgtctactgatgccagaaagcggtatggtcagtgtgaatggcatggatgttgcggccacagagagtgatgtattagccaaaaacctttccatactacgccaagaaaatcagtttgtgagtcgcttaactgttgaagagttagtcggttttggtcgctacccttatagtaaaggacgcttaacgctagaagataagaaagtgattgatgaatcactcgattttcttaatttgactgaatttcgtcaccgttatcttgatgaattatccggtgggcaacgccagcgtacttatgttgcaatggtattatgtcaagatactgaatacgtgatgcttgatgaaccgcttaacaatcttgatatgaaacacgcggtcattatgatgaaattactgcgtaaagccgccgatgagctaggaaaaaccattatcatcgtcattcatgatatcaatttcgcctctgtgtattccgactacattttagccatgcgcaacgggcaactttactatcatggctcacctaaagagatcatgaaatccgatattatcgaagatattttcgatactcccgtcgacgttaaagagttggatgataagcttatcgcgatgtattactaatattgctatttcaccgaaagccaaacagcatattgttacttttaaacaatatgctgtttaattacttcgtagtcactgtaaccagttcagaatcaatatcgctaaaaatctcttcccactcattatcatcaatatccattaaaccaaaataccgtagcaagaaagccccctcggtggctaaaaaagccagtctcgcccgtttcccctctactgttgtggtatcgacacccgctaatctttgctgataccacgctttagtactttgcaaatattctggcgtttgcagtaacgcagccattaagctggctcctttggcaaaagagagcttatcgtgatcatgagttgcatgaatatgtgctctaacgcgattattggctgagttatcattggcaaccacctgattaaatcgcgcttcatatcctccttcccaatgttcaaacatggcatcaatcatcgcttctttactattaaagcaatattggacaccacctttagaaatccccatttttttggccaccgtatcgatagtcagagcggcagccccttgctccatcacgatgtcaaaaatagcctcaagtaacttttctctatcaatcgttctttggcgtcccatttaaaaaaacctcttttcaatacgaccgtatggatttaaaattattattcctagctaaatataacacctaagataaccactgagactttatatgataaaagattataagcgttggatagtcttacttttagtatcaagtatgctgtttctaattgttgttgatgttaccgtactttataccgcactaccgcgtttaactcatgatctcaatgcgagcgcctcagaaaaactatggatcatgaatgcctatccgctgattgtcgcagggctgttgccagcagcaggtatgcttactgatagaataggtcataagacgttatttattagcggattacccctttttgccatcgcctcattatgtgcggcttattcccctagtgccaccagcttaattatttctcgtggtttcttggccgtcggtgctgctatgagcatgcctgcaacgttgtctattgtgagacaagtatttactcatccacaagagcgtgccgtcgccatcggtatttggtctgctgttgcttctggtggcgcggcattagggcctttaattggtgggttgctattaaaccatttctggtggggctcagtctttttgatcaatgtccctattgtactacttgtgcttcctttctcgatttggctaattcctcacttttcgggacaacggcagcataaaattgattatttaagctcaatacttattttgattggcttagtcagcgctatttataccttaaaagagataggtaaggcttatacacaatggaatgaagtgatcatcgccacccttattgccattatttttctcacactatttgcgcggcgccaacgtcgtcaaacgcatccaatgattgattttagcctatttaaaaagcgctatttcagtgtcggtgtggcaatgtcgactctttctatggtgatcatcgtgggtattgaatttctgctaagccaacgcttacagttagtcgccggctttacaccattgaatgcagctttagtgattttacctatccctatcggctcagtattagcctctcctttggctgggttttggctagcgcgtttaggtgcagtgcgcttaattattatcggattcgccctaacattaatgggtaacttatggttaattgccatttcaaactcaccgataatgctaatgggtagcctctttttgattggctttggtttaggcattatttttaccaccgcatcgacctctattatgctaagtgtcgacgataaacaagcaggtatggccgcttctattgaagatatcgcctatgagttgggtagcgtgattggcgtgacatttatggggagtttaatgagcactctctataccttaaaactaactttaccggatacgcttaacgtcaatagtgtcgtttatgatagtttagatgaagcacttattgtcgctgaaaagcttcccgaagcagcggcgaccctcttaatcgcacaggctaatagtgcgtttgaatatgccttttctatcgttctgatcgccacagccattgtgactacaataagcttaattgcactcccttattgcttgcgtaatgcggtaagagaaaacaagcccagccactaattcaagctcatagaaaacgcgccgttatggcgcgtttctcacaaaatcagaaggtgattgtcccatctgctttttaaacatagtagaaaaagagctagcgctgttatagcccaaatcaaaagccacagcggtaatgctatgccctgataaaatttgcgtgagtgagtttaaaagacagacttgctgacgccattgtgaaaatgccattcccgtctgttggcggaaaaaacggctaaacgagcgttcacttttatgtaatttctcggcccactgctgaggtagagcgtcaattttgggctgacgaataaaatcgcgacataatttagctaatttactgtcctgtggaataggaacaaagaaaggcaaaggttctgctttcgctaactcatataagataagttgcattaaaataccatcgcgcccttttttatcatattgcgcaggcacatcaacggcttcaagaagtaattgacgtaaaagcggtgacactcttaacacttcacactgttgactctgacgaggagctgccgctggctcaatatataaacttctggtactcacatctaacatgcgtgtttcatgccccgtctgaggagggatccacacaccacaagagggagggataacccattccccatcatttgtgctcacttcaatcaatccggtagcgggatataaaaattgcgctcgtcgatgtcgatgcgtttctaatagcgtattaggcagataatctgtacccagcgcaatcacatctctctcaaggagatcaacactttctaacggcacatttctcacattaaacctacttttttatctttcttgctgatgagcaaatctggtcactatcacattgcaagatggcgaattaacccctttcgctatttagccaccctatcccgttaacagctataaaacttactattaacactgtcaataaataggccgaaattctaatgtcattgtctgatcttggcatgttggaaagcgattaatcctctactatccctcttgcagaggttgtttcaggcgctctgcaacgcggtatgcattcaataataatgcagcggaaaccagatatccccatatcaatagtctagaaaacgcatacacatctttatatcaagtatcgggtaaattggcttccgcttattatatctaaggtagcatttatatgagcaatcagtccgatcatcatagtattaagccaatttccggtgatataagtcgtcgccattttattcaagcgagttcggcattagtcacactgccctttttttcctccaacacgatggcggcaacacaagatcatgcaatagctgaaaaaacgattgacgccaaagagagtgagcgtgttgtctctacctgtagtagttttgactgtggcggaaaatgtgatattcgcgcgcacgttaaagatggcaaagtgacacgtattagcactcgacctgacgccgatttagatgaagagatgcctatcatgcgagcctgtgtacggggccgtggttatcgtaaatttgtctatcatcctgatcgattaaaatatcccatgaagcgagtaggtaagcgtggtgaaggtcgatttgagcgcatcacttgggaagaagctacgacgcttattgcacaaaatatgcaacgtattaccaagcaatatggccctgcctcacgttttgtcagtttaagcaccggggtgactggtggcattttttctggtgctaatatgctacgccgtctgtttaacctaactggcggctttctggagaattatcactccgtgagtaatggtaacacccttgccgttaccccttatacttacggtacagccgctagcggaagtacattagatacattagcaaatacccctttagttattctatggggacataatcctaatgaaactatttttgggcattccaatcattacttccaaaaaatgaaaaaaaacggcactaaatttattgtcgttgatccacgttattccgatactgcctcttctttagctgaccagtggatcccgctgttaccgaccactgataacgcgatgatggatgccatgatgtatgtcattgtcagtgaaaacctgcatgatcaggcctttatcgacaaatacacccttggttttgatgagcatcagatgccagaaggcgttggtgaaaatgagtctttagttgcctatttaatggggaagaaagacgggatcaagaaaacccctgaatgggcggagcctatcactaaagtacccgcagatactattcgtcaattagcccgtgaatatgcttctacaaaaccggcagcattaatccaaggttgggggccacaacgtcatatttgtggtgaacggacggcacgcggtgcgacactgttagcgactattaccggcaacgttggtgtacgcggtggctgggcggctggctatggcatggcattaaactctgagttacgtaaaaccattgccggcccaagtttattgaccaatcccgttaaagcaaaaatcaatatcaccaattgggtgcaagcgtgtgaagataaaaatttggtcacaccacaaaatggcttactcaatgccgagaaacttgatactgaaatcaagatgattttctcaatggcgggtaattatatggtgaatcaaaataccgatattcttcatgccgctaaagtgcttgaagatgaatcaaaagttgaatttatcgtctgtagcgacctctatttaacacctagcgccaaatatgcggatatcttactgcctgaaaccagctttttagagcgctggaatattggaggcacatggagttatggcgattatattattctgtccgaaaaagtgatagagccagagtttgaacgtcgtaccgactacgattggttatgtgaagtggctgataaactgggggtcggtgaacaatttagcgaaggtaaagccactgatcgcgactggattgaatatttagtcaatgatgccagtattaaacgtcctgaagatggtattcctacctttgatgaattattggttaaacgtcgtcatctgctaaaacatcgccctcatacccaaaatgttgcgtttgagaaaaatattcaagatatagaaaataatccatttccaaccccatcaggaaagattgagatcttctctaaacgcttatatgagatgaataatagcgagatccccgcactttctcattatgtgcctgccattgaagggcccgaagatacgttaacagataaatttccactacaactcatcacgtggaaaggacgtaaccgcgcaaactcaacacaatttgctaatccttggctgcaagaagtacaacgtcaagaattatggatcaacccattagatgccgaagatagaaatatcaaacaaggcgataaagtcaaagtctataacgaccgtgggatcaccttagttcccgtcaaactcacacaacgcattatgcctggtgtcgttgctttacaagcaggtgcttggtggcaaccagataaacaaggtatcgatcaagggggatgtgccaacgtcttaacctcatcccgtagcaccgcaatggcacacggtaatgctcaccaaactttattggtcgaggtagtaaaagcatgagtaaatttatcgtttatcccgcagtaagcagtaaacagctagggttttatatcgacagtgctcgctgttcgggctgcaaggcgtgtcaggttgcttgtaaagataaaaataacctcgatgttggccgcaaatttcgccgtgtatatgaaatcactggtggtggttatagccgtaatactaacggtgcattaattaataatgtctttgcttacactttatctatctcttgcaatcattgcgatgatcccatttgtgttaaaaactgcccaactaccgcgatgcataaacgcgaaggtgatggcattgtgatggtagatactgacaaatgtgttggttgtggcgcctgtgcgtggtcttgtccttatggcgcaccgcaaatggatcctgaaaccaagcagatgtcaaaatgcgatttttgtatcgacttacaacaaaaaggtgaacagcctgtttgcgttgcgacctgcccacttggggccattcaatttggtccaattgatgaactacgtgaacgctatggtgaagttaattatgtcactggtttgccttctcctgaaataactcatccaaacctagtgatcaaccctcaccaaggggcaaataatgacactataaataataaaggagaaataaaatgaatgaatggtcattattgattttcacctttatgatgaatgccactattggcttaacactcataacaggcctttttgcacgccgtcttgcacattatctcagtgctgaaagctattatcgctttatgttactaaccttattggtgatttgtggattagccggtttaggctctattgcctccattactcacttaggcgtgccgttaaatgctccgaatgccattagaaatgtcttttcagcttggttaagtcgcgaagttgctgtcactgccatttttgtaggatgtttagggatcacctttttatggctatggcgtaccagtaaattttcgatgctgctatttggtgcaagccttctgattggtctgtttgacatttattgcatggcatccatttatcgccatacttccattttaacatggatggataacaacacttatgtgatgttttttggcgcgatgctcacattaggggcaacaatattctttttgctgctaaagatattgcagcgtataggcaataaattagggatagaaataccatcagcccctttccctatccgttggaaatggcaattgtgggggatcatggcatttagtttaattggccgattactctatcaacctttttatgaacactatttaactcgtacgctctatagccaaacatcggtaacctttccgttatcacctattgaagtctattactccattggcccattacgtatgaccagttggatcttagcaactttggctgtattggtgtgtggctatagtttagtaaaatatttgatgggccaaactcagcaaaaatcaacggagtccatttttgtctatggcggtatcatggcaattattgcagaatttgctttgcgttatgtgttttattcaattcactaaatcacgatcagccagttattgaagatgacaattatcaggggaattattagcccctgattttttatcaaagatcatcgttcaccctgagtatcaatcaacagacgttgattaatataatcaatcgtttcttctattgtcataatatgattaatcacattagtaataccctgaccaataataatctcagcttgccttaagttaaataatttaccattcggcactgatgattctcgtattccttgattaatttcctgataagctagtgtcatccatggataacggtggctaatttcttggttatgactaaaattttcatggttactatttccacccaataaaattaagtgatccatcacaacaggagaataaagccaacgataaaacagttcagcgtaagatgattttctactgtaacgcgacaccccaagtaccccaccccctaattgtggtacaccacccggaacgggagcaaaaccaattttaggtaaaatatcgctatgtgcgacatcattaaataaattcatataagagataagcattgccagatgaccttgctcaaattgtctgaccgagccactccaccatttatggttgatattttcggtgatcgacaactgatgcaaataatctgctaatacctcagcggccaagggcatcgctaagcgcggaatattatcactaccgattaaacgcccacctttagcgtaataacgtaataagtattcagttgcgattaatcccgcacttcctaatgtggttgaagctcccatcggacaatgagcttgcccggcttgatgcaactcagtaaaaaactgagtcacattatcgtactcttcaaaggttgtcggcacagttaattcattacctgttttttcgtaatacattctttttaaaatagtatcttcaaacagatctttacgataaaacagtaattgagcgctagcatcgaacggcattgcataagcgacatcattaaccaaaccaaatttttgttgcgtaggtaaggaaaagtgactcaataaatcagttaatccatcaccaattttatctaatggtcgcaatattcgctcagcaaaccatggaaaacacgccatatcaatacgcaacagatcataataagggtgtaaatgaagttggcttaaaatttgatagacttcatcataaggatgaatagctaaattcaccttgataccagtttgacgataaaaatgaggaagtagtttttttaatgccgttgttgaagggcttggcaacgttagtaaattaagactaatttgtgatttatcatcactcattactgctggtgttgccgtatacagatatgaacttcgatttgcgacagatacattattatttttgtactcatgcggctctgcgattaatagtgcctcagcgacttccaaaccaagctgagcatagttcattggaaaacaatataacccttttattaccggcggaatattatcacttagagcaaagataataggacaatctgaagaactgccaaaatagcttgcttgtgttaaatagcgagctttctcaatatcttgtgtgacaaagatatcggggactggctccatagaaaagaagtcaaaagcaattttataactctcttcatcagaagcgctaagtatgacacattttttatcgggtgcagtttgagaaagccgtatttgcaattgattagcaaaaacctgactatttaattcatcttgattatcgccaaaaatccccaccaccttgccagctgtttgtgccacttgctggcaaattgactccgccgcttgtgcaaaatctaacgtaaaaaaacgttgtgcattgaggggtttgtgataaataaagataatttgtgaaggtggaagttttaacgtgtcaaaatagtatttagcatctttaagacaacttacggtgactacttgcttatagccacctgcagcaattttttgtagcagatcacgctcagtggtctcaagaagatctgttaaaaaaagatcgtagctgatctctggaaaattaacgatcgactgtctaaaagcattaaagaagatcgcatatttttcagaaaccagttggggtaataagatcgcaattttatggcttctattggttcttagtagttgggcttgtgtatttaattgatagcccatctgtttagcagcttgatagactgcttcaattttttcaacacttacatttccacgtttattcaatacgttagataccgtaccatgcgaaacacccgctagttttgcaatgtccttgatcgtcgccatttctcttctttcacctctatttccaccttcactagcatacctgaattatttatcacgactactgataattgatttgaacgttccacttacaattagctgataaatcaatctattaaaaattaaagataataaataattatcaataccaattaaaataaatatatatactaatcaacatattagtaaataatatttgaataagatcactgatctgatcttcatttattggcaaataacacatgtcattttattattggaacgttcaaatttgtttgtaacctacaaatagccaacaccagaaaattaataaaatactaataaacaataagataaggggatttattatgaagcttcattttttagggacggctgcctcagaaggcataccgaatcccttctgccgttgtgaacactgtctgaaagcaagaaaattagccggtaaagatattagaacgcactcttctgctattgtggatgacattatgttgatcgatgtctcccccacttttagttaccaactgatgcgtgatggtatggacgcaacacattttgaaagtttgctatttactcatactcatcctgatcattttaatgttggtgaactatttagcagaatggaaggctatggttttgaaattaaccatcctttacatattttcggtaacgatcgcgctatcaatggctgtattgaagtattaccaggttatacgaaagagcgatttgcatttcattgcttaatccctttcgttacggtcgaaagaaatggttataaaattacgccgctacttgctaatcatgcaaaatgggaactttgttatgtgtatcatattgagaaagatggcaaagctattttctatggccatgattcgggttggttcccagcattaacttggcaatggttagaaaacaaaccgcttgatattgttgtttttgagtgcacttatggcttaaatggaaaagatcgtacagataatcatatgagcttagaaacggtttttgccgccaaagaaaaactgcaacaacaaggctgtttacatcaagctacacagattgtcgtttcgcatatctcacatagcggtaaattactgcatcatgaattagaaacggtctgtgctcctcatcatatccgtgttgcctacgacggattaacgttagaaaccaattaagaggggtacgacaatggatatgaaaataacttctcgcctacttattatgatgtttgtgcaatatttcatgcaaggagcatggaatatgaccatgggactcgtattaagtagttatggtatggcaagcattatcggcaatgcttatgccttattaggtgtcgcgacaattatctcccccttatttattggtatggtcgcagatcgtttctttgcttcacaaaaagtcatggggatacttcatttaattaatgccgtcgttattctctgtgttccccaatttattgaagctcaaaacagtggcatgacattatttttaatttttattattggcttattgttttatccaaccactgcgctatctaatagcattagtttctcccatattaatggggttaaatatttcccaattattcgcgtatttggtacgtttggttttatggcaattggttttatattgggtgaaatgggcttctctggtagcacaatgacttggtatatcgcttctgcagttggtgtattactcggtttctattgttttacattacctaatacgccacctaaagcgaaaggccagcctttctcactacgcgatattttatgtttagatgcattgtctttatttaaagatcgctactttgctattttgatgtttagcatctttattttaatgatccccaaaacagcttattctgcttatattcctgtctttattaaagcattaggctttgataatgcagcttctattatgcaaatagggatcgcttgcgaagttctgtttatgtttgttttgtcattcttcttaatgaaatttggcttcaaaattacactactgctaggagccgtgagctggatcatacgctctatgtttttctcttatgctgcagtaaatacagagctttactttatcgtcatcggattaatgctacagggattatgttgggatttcttctttactgcaggagatatctatgtcgatcgcaaagcaaaacctgaaattcgtgcacaagcacaaggtctgcgctttattgtctctaatggtttcggcttactatttgcttccactatttgtggtcaaatctttaacacaaccgtaactgaaacaggtgatgcagcattaccacaatggtcaacattctgggtctatcctgccattgtagcggcggtggtaaccctattctttattttcttctttaaagatgatgtttctaaaaaaagaaatagtgaaaataaagaaacatcacgaggaattacagcaccttaattttaaaataaaaaataagccaacgtcaggagcaaaccatggatgcattaatacagtttgttgacactattggcccattatcactatcaagtattgctaaattactggccgcctttatcttaggcggtcttattggcttagagcgtgaatcaaagggaaaaccagttggttttaaaacttgtgtcattattgctgttgccagttgtttattaaccattgtctctattcaatcagccgaatattacgccaatatttctgacaatattcgcagtgatcccatgcggttagctgcacaaattatcagtggggtcggctttctgggcgctggtgttattttacatcgacgagatgatgccatttcaggattaacgactgcggccattgtttgggcatctgcgggagtgggtatcgcctgtggctccggcttttattggcatgctatcgttgtgactttcctcttttttatggctattaaactgagcccacaagtagtgctgtttcaaatgaataatcaacgcttaggtaaaattaaagtgcgaatgctatttactcatgaaagtggtgttcctcttttaattgactatttaaaaagcaacaaaaacgttattgaaaacctgactattcgtgatattaaaaaggagcgcgttgaagttaacttaaaactacttgtgcgacaaaaaataaccttaccagagttttattgctcattaaaacaattacagcatgtacattctgtttcgctagatcattaaattaattctattattgatagagaaacaaccatagtgcccctatattcttaaataggtggcactattataatctaagtaaaaacagcttggttattggttctctttaaatggattacccatcttattaagatacatcatgccaaaaatcgttgatgcataatcagtaatatgtcctacatcacgataaaccggcactccttcaatatctgttaagcaggtatctttatcgcattgtacatctttaggatcgataataattaagcttggatagtcctgttttaatttagcaaataattggttcatccatgtattcccctcacctttatagtttttgggattacagttgttatcagcaaaatcttttcttaacttggcattttcataaaaacaggtcataaaaccacgaggcattgaataaacggtttttataaaaacaggtttggctccagtagcaacaatgatatcaagcgcttcacgcatcgatttttccacacgttgacgagatgcctcaaccgttcttttatcacctattttattaataacatgatttgaggcgtaattattccaaacctgtccaaaaatcacataatcaaaccgattatgtttaataatctggtaatattttgctgtttgatcataacaacgttgataaaccgtattcttatgattagaccaatcataaagataaatattaggaatagtaatgcatgatgaagttgcttgcgcatagacatcaagctcagcatctttacctaaaatatccataaatccccaaaaatgattagcatgggaatcccctaataaaaaggcttttttctggctacccactttaccaatatgacacatcttatcaggatcagaggcttgaaaattcatacaattacctcgattgggataatcgaattgattgagtttgttttctaaattaacgtaattttgcccaagccttactccaaatccatgatacttttcatttaatgcatttaatcctaaagccaataaaataggtataacaaacaataatgttatcgaatatttaaagttcaaacgctttcttctaaacggtttttcaataagaaggtaagaaaaaatagagagtaaaaatgttaatgctaaaaataaccctttttgtatctcggtgttaaatacgcctatataacgcgcaatagcaaataagggccagtgccataaataaagtgaataagataataatccaatgatcactattggctttaatgacaacactttttgaataatactgccatgttgtcctgtataaataattagtgcaacactaagacaaacatataacgtattgaaattcggataaccagcaatcacatctttttgaacggctatccaaaagataacccctaaggcgatgagactaataacactattaactctttgattaatgattacttttacgggtaaataagcaacacaagcccctaacataaactcaaatatacgcgtactaaagtaataataattcttaggttgatctttttgataaacaagcaccaaggagaaagaaattattgtaataaaaacaataaaataaaaattatttattttctctttatgattaattttgtgaagaaaatagagtacaaaaggtaagaatagataccactgccattctattgctaaagaccatgtatgtaataacggtaagaagagtgcatcttgcgctgcataactagtcgttgctcttgcaaaatatttgttagacagaaaagctgaagcatatttttcactattagtgatatcaagataatcactaggtagatagaaaatacctgaaattacaagaactgctactaaaacaaaaagatagagtggctgtaaacgccataatcggcgaatataaaaatcaccaaatgaaaaatgaccttgtaaaagtgatgttttaataattaacgagatcaagaaacccgagatcacaaaaaagatatcaacaccaataaaacctgatggtattaagcgattatctaaatgaaagaagataaccaaaataacagcaattgctcttaaaccgtcaatatcagcacgatattttatattcataactcaatgtactatccaaataaaaagaattgctggattatacatcaattaaaaatatcactttagttgtaaagagaatatttttaatattgatataaatgatttcaaatatctactgttactgttgattaaactctatcgtcttatttaacaatatctcagacgatagtgagcctttgctcaccacaaatttaggatagttaatgctggttttaatattgattggaagtgataatcgattatgtgctaaaaattgaaaaagtggtgttattttttctgatgacacgctttcctgtaagcgcccaagcgtaatgtgaataatatttttatgcagatgatgatcaatggggatttgctggtaaacctgttgtctaaactgcgttaatgtttttgatacacctattaatatcacgcttccattagtcgttaaaataatatcattaaataggatctcaatctttcctatcttattaaagatattcgttattttttgacaccaagccagtaacattaatttctgaggctcaaataacgctataggttgattaaaaatggtcaacaaagtgcaatgaagttgtaattgtggagtcaccgctataaaaggaaattgctgagcaatttgctgacaataaacatctaattgttggctaaaagggataaaattctcatccacctttggtttatcaataatgagctgccccgcatttaaactcaaatcgataatatcttcattattaatctgttgtaaccacttttcattgcgcgataattttttaactgttgcttgggttaaaaatgaataggccatcgataaacctcggtaacgaagattgttattaatacattgaattgaatggtacttaaaatcaagtcataaagtagataataaaaaagtggctctcaagcgaaagccactgtcacatccaatgggggagatgttaaaggataggtttatctacaatgttatgctctaagcaaaacgcaatttatgataagaaatttgccgccttaaatttcgccagtgcatctgctttttgttcagcagtcagtgggcgtaaaggacgacgaggagcgccaacatcaataccatgcaattgcattgctactttgcctgcagcaacgccaccgtattcgactaaaactcgaataatagcgataactttatccatgcaatctgccacaccttggtgatcaccctgattaaatttctcaattaactcaagatataacggtgcagcgtagttataggtgctacctacagcgcttaatgcaccgcaagctaatcctgccggaataaattcatcaacgccaaatggaatatcatatttacctccctctacccgtaagcaacgctgaaattcatacatatcaggggagttaaatttcatgccagataaattggggatcactttaccagctgcttgtaaaaacttttccatatcaatgcttaatcctgacatggtggaatgataatagtagaaaccttttgagggtgcacttgccgctgctaaacgacaatattccactaaatcatcaacatgactaggtttaaagaagcaagggccaatcactgatgtggctttaatatctaatgtttcagcatgacgagcaagttctaacgtatcagcaatacttaatgcaccagtatgaataataagatcaagttgtccctgactcgctgtaacccaacgttcagcaacttttttacgctcttcaaccgagcaatgtataccttcaccagtagtacctaagacataagctcctgttacccctgtcgtaattaggtgcttagcaatatcatcaataacagggtaattaacactaccgtccgcagcaaaaggagtatgaggcgcggcaatcagtccagagagtttgttcatgatcacttcctatggagattaatttctttattaattaacttatggagtttaactctatattagagagcgactagtcataacgcaataacgaaaatagctctgaaggaaagagaaaggtgaaattgtgatctttagctactttctgctcaagatactttaaaatagcaataaacttatgctgaatgcgtctgttttaacgcattgagagtacgtaatttctgctcttttactgtttcaggcttagcctgaactaacaaggtataaagcaaatctaaaacaaaaagttgtgctgtttttgtgccaatagaatcgccttgtaatttcccttgtcgattaccattaattaaatgatgatctgcatattccataatttgtgagcctaaattatgcgtcaatgcaatcgtgcttgcgcccgcttctttagccaatttcaatgcatgaaccgtttctaatgaattacccgagtgactaataccgatagcaacatcaccagattttaataatgaggcttgcatatacataaagtggttattagttacggcatcaacacgataaccaatacgcataagtttatttttcagatcttccgcagtgatccccgaagagccaacgccgcagataaaaacatagtttgctgataatagtgcattgaccgccccttgcacttgctgcatatcgagtaaatttaatgtttctgataacacattatttattgttgcttgcaattttaggccaatagtatggatatcatcttggtgactgacttctgcatcaaggattggcgattcatcattatctgatgttgccatttcaatcgccaaatccattttaaagtcttgaaaacctttataacccaatgtccgacaaaagcggacaaccgtcgcttcacctgctttggttgcttgagagagttgggcaatagacaactgagtcacttccgtaggatggaacaggatatagtctgcaatacgttgcgatacgcgagttaagctatttttcatagcgcctagcgtatcaagtattttacccggctttaatcgagttgttgcctgttctgtcatggacattatccttgcttgcagcaaatacacgagaatagaattttgcccacaagagtaccaattccaacaggttaaaaaaagccttgttaagacaataatgtgataataacaaaacgccttattctcagtatcactataactccaactaactgatacatgagaaataaagcgttttattaaataataatgattagtgagttaacgcggcaacatctagtttaataaccactttctttaatgtactggcctcatttttctgcgcaatacctggcttatgtggctcataaggcataaaaatggcgaacatatttggtgtaagggataatgtttgacgatgtatgatgttatcagtcaactgataatcatccgtttcattataaggtgtcacatcttgtgccgaaccttgtattccaaaatcaattgtctcttcaccggatagtaagatctgaatatcgatataacgctgatgcaattcggcttgtttttgctcacgaggcacggtttcaaaagtcataacattcataaacaacgtctcaccatcaattttatagctgcccggtgcaagtgacgcgggatcaagtgctaatgctttttccattgcatgacgtaacgctggattcatttctggcatagtcgccaaatcagataaatgtccaaataacatagattattccttcttagttctctgatgtttcactgtcatctaaggaaagctgttttgctggtgcgaaaagtggtgccgtaatggttcctgcaatcaccactgacattgaaccaatgactccatagaagaagaagttaagatcactgccataacgtgcagccaatactgcaataatactcacgatgatcccaacaacggcgctaccggcattagcacgttttacaaaaattcccagcataaataggcctgtcattggtccgcccataagacctataaggctattaaatgcatcccaaatttcagcttcatcggataaaactaaccaaattgccgctaaactactgaatatccctgccacaataataactaactttgcgactttcattttttgttcaggactaggggatgatttactaagacgagtataaatatcagaattaaagcaacttgaaatactatttaaactactagaaatacttgattgtgcagcagcaaaaatagctgcaataattaaccctgcaataccgataggcatttccgtcacgataaatagtggtaaaattccccccgtattaaatcctgcgggtaataaacttgggttttgttggtagtaaacaaacaatgcagagccgatggcaaaaaagaaaataggaataatagccactaatttagcgttagttatcaatgtacgtttagtttctttaatagaatcggtaacgatatagcgctgcacaacatcctgactagcagtaaattgctgaatattggcaaataaaaacccaatcattaatacaggaatagtgctatctgtccaactccagcgccattgtgtggtaggaaagaatttatctgcttgtgctgtagtagtaaaaatttcgctaataccaccatcaactttaaaacagatcataataaagatcagtacagcaccaccagaaagtaataaaccttgaataacatccgtccaaataacgccttcaatgccccccatccaagtataaataatgcataataagcttattaatacgattaacacgaccggatcaatccccataaaaggacgtaaagctagtacggttaaataagtaataatagcaacacgcccaatatggaataacataaatgaaaggctagcaaataaacgactacgaacatcaaaacgagcttctagatattcataagcggaggtgatttttaattttctaaaaaaaggaatatagaaataaaaaactaaaggtaaaattgcaatagctaaatactgtccaataataaaggtccaatcagaagtataagctttagcaggaatggacataaatgtaatcgagcttaatgtggtcgcaaatacagacacaccagcggcccacccaggaactcgccctccaccacggaaatagtcatccgcagttttttgacgtttagaaaaataaacacccacgagtaacatagctgccaaatagccaaacagcactgcatagttaataaaaccaaaatcatgtaattgcattttttagtcctgccatatgtagggtaaaaggtaagttttacgacagtttttttattgctctctagaccatagggctgcgccccataatccagcatcatgatgatagtgagctgatacaatcggcacttgtaatgctaatggttgttgtgccatagcaacttgaaccaattcgagatagccgttagcaagccccacactgccaccaagcacaacacaatcagcatctgttgtagctttaatatttgtgatcaaattagctatggtgttggcagagcgtttaataatggtggtagcctgtaagtttccctgatgaaaagcgctgaaaattgccttagcatctttaccagcaagttccccttcggcctgtgaggcaatcgcacgccccgatgcgatggcttcaacacaaccatagcggccacatccacaacgagggcctcgaggatcagctaaggtatgacctaaatggcctgcaagaccacgttttcctattagtagctgcccttgctgaacaatgcctccgccaacgccggttgagaccgtaataaacaccatatcagatatagtgtcacgacgatgataatactcagcccatgtggcagcttgggcatcattaagtaaccaacaaggtgatccggtaagggttgatagtgtttccattaaaggaaaatcgtttaatccacctaaattatcggggtttaatgcggttaaaatgccattacaaatgatccctgttgatgcaacggcaacactatcggcatggttttttaatggtgtaataatgctaactaatgcttcataaagttgtgttggagatggacttgctggtgttgctatttgtcgatgttgtgtcaattggttatttcggctaattaatgctgccgagattttggttcctccaatatcaatcgctaatgtattcatttatctaactcctgctgccactttaatgcctgagtaaaccactcacagacatgttcaagacgagttaatgcagagccaacggtgacagcccaagctcccgcttgcataccccttgccgccatcattggtgtgttataacgcccttccgcaatcactcgacatccttgctctgctaatgcggtcaccagttgaagatcgggtaattttggtatttccccaccggtataacctgacatcgttgagccaataaattcggtaccgagttgatgacaatacatcccttcattaaaagtggcacaatctgccatcgctagttttcctaaacgatgaacatgctctagcaatgctttcacgggaactgggcgtaggcgatcagtaccatcaaaagcgataatatctgcaccagctgcagccaatgcttcaatatcatttaaccaaggcgtgatcctgacagggctatcaggcaaatcacgttttacaattccaataattggcacatcaataagaggacgtgttgcttttaaattatcaattccttcaatacgtactgcgacggcacctgcatttactgctgcttgagccattgcggctacaatgtcaggtttatccattggactattatcaacaggttggcaagaaacaattaacccacctttttgttgaatatctttagtcatcttttcaattagtgccatgttgaactcactgctctctttttttgaaatgtaactccgaattatattattttacggagttttatttctcaatcagaaaaactacgatctgtgaagaagatcaaacaatgaccaaattgatataacatgatgataaataaacagaataaaaatggaggccaaatagcctccattgattttgttatatttctcttgagtgattaatttagtgtgtcgctgtttttgcttgctcgactaaattaattaaacgacttctcatagcgtgattatcttgagcgacttggctttctgcccatttttgatcgtcaatcttcaccactcgtgcagcacaatatttagtttctggggtttttgaaacaggatcgagattatcttgtgtcagttcgttacatgcaccaatccaccattgataagtcatataaatagcttgtttattaacggtttcgtttagattacaccgtgacaacaccttacctcgacgagatgcaacccaaacaatttcttgatcagcaatacctgccgctttagcaatatcagggtgaatttgcacataccccggttcatctgctaatgatgctaatgctttacagttacccgtcattgagcgacaagagtagtgccctacctcacgtaccgttgataaaatcattggatactcttcatcaggcaattctgcaggagcgcgccatgcggtagcaaaaagctgccctttacctgatggcgttgtgaatcgattatctgaatataaatagggtgttcccggatgatcgagctcaggacaaggccattgtatatgggctaatcccgctaatttttcataggtcgcaccgaaaaatagcggacataatgctcttacctcatgccaaatttcttcattatctgtataagacattggatagcccatagccgtggctaataaactaatgatttcccaatcacgtttaacgttaccacgtgcttgtactgcctgttcaaaacgttgaaaacctctatcagcacaagtaaaaataccaccgtgctcaccccaactggtagaaggtaaaataacatctgcttgctctgccgttttcgtcataaagatatcttgaaccacaataaaatcgagcgcttgaaaaccttttctaaccagacctaaatctgcctcagtttgaagtggatcttctcccatgatgtaataagctttcactttaccttcaatggctaaatgagggacttcagtaatgcgataacccacttgcggatcgagtttttcaaccggaatatgccaagcttgagcaaatttttgacgaataccttcatctgtcacactttgatagccggggaacatattgggtaaaacccccatatcacaagcaccttgtacattattttgcccgcgaacaggagcaacccctgcatgtggtttgcctaaattacccgtcaataacgctaaactcgctagccctttcacaacatctaccgcttgaccaaattgtgttacccccattccccacataatggtggctgtttttgcggctgcataagtgcgcatagcttggcggatctcgcttgcagaaaccccaacaatacgttctactgcttcagggctataatccaccagctgttttttatattcttcaaaaccttcggtgtaacgactcacatattctttgtcataaagatcttcatcaatcagcgtataggcaaatgcattaactaacgccatattggtgccattctttaagggaagatattgattagcaatcttcgctgtttctattttacgaggatcacaaacaataattttggcccctttttgtttcgctttcaccacacgacgcgccacaatagggtgagagtcggcacagttataaccaaacaccaacaaacaatctgaatcttcaatatcagcaatggaattactcattgccccattgcctagtgtttcttgtaaaccagcaacagaagggccatgacaaacacgggcacagcaatcaacattattattacccagtacagcacgagcaaatttttgcatcacaaaattggtttcgttacctgtaccccgagaggagccggtgcacataatagatttagcaccgtatttctctttaattgcgagtaactttttagccgtaaactcaatcgcttcatcccaactgacaatttcaaaatcagcccctttttgtcggcggatcatcggttgatgaattctggctgtcagtaatttattgtcatttaaaaaatcccatccatagagaccttttaaacaaagctcgccttgattagtgacaccattggcaccttcagctttgattattcgaccattttcgacacagagattgattttgcagccagcgccacaataaggacagacggagttgattttgttcatttgatatcctttcccctaactagggagtaaaagagtcataaagaacatccaactaagcacgatttatgccaagtaaaaaaccatgtaaaaataagtagatagtatttctgtcactggctaccaaggttatatcgacatttttgtcgacaagattttctgagcaaaagttatcaaaacgttatcaagttttttaaaaaaagggctttcattaatttgtttttatgatataacaaaatagttatttgttagcagtggcattcaataaatcagtgcaacaaaccaaattcatttcaataaagagcaaaaacatgaacattaacactaacaatcgacttctaggcctatatctactcctactttattagggtggccaagctcgttcattttttgctaaagccaccagtaaggtggtttttttataaccctgctggtggaactgtttttaggggagtttttatgatgtctcgttccactacaaggattaagggttatcacacctttgcaatacactattgttcggcaaccgtttctatcattaacataatgaaatcggaggcaaaatgagccaacaatggacatctcgtgtaggccatattttagcagccgctggctctgccattggtattggtgcaatttggaagttctcttatgtcgccgccaataatgggggtggtgcattcctcgtcgtctttctgttatttagctttattatcggattagctgttttattagctgaaaatattttaggtagtagcacccatgccgaagccgttaatgccttcaaaaagatgatgggacgtaattgggtaattatcggtgtcattggtgtatttagttcatggtgtatctatagcttttatagtgttgtcggggggtggaccattggttacaccattatggcagctactggtgaattaaatattactgatagtagtgaattaacggggatcttcacccgttttatcagtgaccctttatggcctattcttgctcacttggtgtttgccggattaacatgttttgtcgtattagcgggtgttcaacgcggattagaaaaagccgtcaagatcatgatgccattgctgtttattatcatgattattttgattattgtcggtattagcttacccggctcttcagaaggtttaaaattattcttatatcctgattttagtaaattaaccccacaaggagtgttagatgcgttgggattagccttcttctcgctgtctatcggtttgggtattcatattacctatagcgcctatttagcggataataagactattgctaactctagtatgtgggttgtgatcctctcttgtttagtgtgtgttttagcaggcttaatgattttccctgcgttaactgctgctggattagagccaaatgctggcccaggcttaacctttatgaccatgccagtctattttgctaacttgcctggtggcaatatcttggcggtcactttctttgttttattattaatggcagcattaacctctgcaatttcattactcgaacatatcgtcgcttatgtacaaatgcgttttcagtggactcgccgtagagctggcttagtggtcacagcctctattatgttaatgggtatcccagtttcattatcatttggtcctatgagtgatgtaactttagggggcaaaacactctttgatttattggattacttaacctccaatatcttaatgccactgtttggtattgcgatgtgtttaatttttggctggtcacgtagagccaatgcggttattccagataatattactggagcaaaacgccaatgcttattattagtttggcgttatatcggccctatctgtatcggtataatattggtacatggtttgattggttaaaaaacaaaaagagagcttcttatttaagaagctctctgactaattatccccgatgtttggatacttgataactttatttattaatagacttattgatagttttgtttaatttcttggctagccacatgcccgcgtttagcttctttctccgcaatttccaccgataaaccgatataggctcttggatcaagcattgctttaatttcttctgggctaaatgccgcagagataacgggattttttatcaagttagtatagaaatcttcgccatctgctgctgttttgatcgcctcttcatacaataaagagtgtgctttatctttgcctagtttttctgccattttcatcataacgtactctgtattatctaatcctttatttctcatgacgttatgtagcattctctcttcatgcggtactattgttctggaaagctcttctgttcttaatagaatttctgttgtcagctctaatgcctcttccagtaacccatcaaataacatataggagctactatccccttcataaggtcttaccgcagaatacatacccacactgggtaaagaatacagtttttgtgagttagcgatgatccctttagccagtttaggattaattttatgcggcatagtgctactgccaacagtacctttggtaaacccttccgaaacttccgcaatttcctcaagtgtcgtactataaacttcttcaccaattttatggcagatattagccatcaatgccaaattagccatatactctaatttatgtgtactaaggttacgagaaggcacctccatcgcttccatgccaactaattcagccacacgtttttgtaccttcatacccacttctggcattgagttaaatgcacccacagcaccgcccatcatgatagtaaagacgcgtttttcacactctctcatgcgctgataacagtcgataaaatcactgatccagaccgatactttatagccgtaagtaataggaatagcatggcggccatgtgttctaccgggcataaccatatgtttggttttttctgccaagttagctaaattttcgatgatctccccaagtagcaacataaatttatggtgcactgtcttcatcatataaagctgtgaactttgctgaatattctgcgtggtaatgccgtagtgcacatatttaccactctcttgggaacatgccttaactaacacttttaaaaagggcacgaaaccatgaccgattttttggtaaatgcggttcatttcttcaaaatcgatattctcaataaccgctttttctttaatttcatcagccgctgactgtggaataaaaccgtgttcagcttgagcttgagcgagcatcgcctcaaacatcaaccaagttgaatatttagcttcattggataacagcgctttaataccgcgatcatcgattgttttacttttagaatcgtataacgctctcattttgtatcctttgttatttcttcattgcttcatcaacagcattgcgaacaaactcaacttttggcccataaacaatatggacatggttcgctgcaggaataaagaatgctgtacaacctgattccaacattaactctttatcaatttgatttacttcaccgatatcgacacggagtctagtaatacagttatcaacgttacgaatattttgttttccgcctaaagcgcgaattaagatctccgcaatttcgccataacgcttctctttaataagcgtatttttcatattgcttgattcttcacgacccggtgttttgatatcaaacttaataatggcccagtagaaaatgaagtaagtgacaaccgccagacctaaaccaataatcactaagtagatccagttggtatgttcatagagcaggccaaagatggtgaagtcaaataccgtacctcggatatagccaatagccacgccagcaaaagagagtaaaaccgcaccaataccaacaataatggcgtaaatcagatataaaagtggcgcaataaacacaaaggtaaattcgagtggctcagtgacgttacctaacatggcggttaataccatggtcaccaacatagatttaacttctgcgcgattctcttttttcgacgttctataaattgctaaggcaattgctgggaataagaacagagtgaccagcatttgttgttgtgccataaaacgcgttaagcttggcatcattgaccaatattcactacttggcccttggttaaacaacacttctgtcatggcaggaacaacacccacataggtttgtccatcaataacgtaagagccacctgcttcggtaaatctaaacaacacgttccatacatggtgtaaaccaaatggaataaacagtcgctctccccctgctgtaaagaatggtccgacaggactcaggaagaccgcggaaagttttgttaatcccatcaccaagacttcccagataaagggtagtaatgcccctacgccaatcattaatcccaccataataatggcaacggattttttaccggagaagaaggcaaaagcggtaggaagttcaaggttatagaatttatctgtcgcccaagcggcaattaatccggtgataatcccccctgcggcactgatattcatggtttgaatacctaacaccttgatctgccccacttgagtcattacggcaggatcagcgagtttccccgtcaaaacgagccaaatattaatggtgctaatcaaggttaaatagccgacaacggaggcaaacacggcgatccccttgtctttatggctcataccataagccacccccatagcaaatagcagtgggatattatcaaacacgacccctgcaatagagcggatgctcactaataatgcattgactgtttcattccccaggaaaggaaagcgtgcaatcatataagactgaactaaagcgccactgatacccagtatcataccgataggcgctaaaacaccgattggcaggagtagggtcctaccaaagcgctgtatggattcgctgaattttttcttggccatattttttccttatgacttctcgaatatagaaaaatgacaaaagtactctagcattgagttatctataaaatgaatggcgggctagttttaaatattatcttaggtcatttattatgacctaggtcttttaaattaaaaaataatttaataaataataaatttttgaagatagaaagttctattattaataaatagcccattaaagagatattgaacaaattgaaaataaaggtgtttttaaaataaattgttattttagcttaaaacacattaaatttattaatatagtaaagaataaggccgtgaaaaagttaatcttgaagagatcattctgagactaaaaaataatgtttaaagtagattttctatttcatttattaacaaatcaaccaaaataaaaaaaccaattcgtgacttggtatcatcttttttcgtatcatgattatccgcgaaacaaaatagcgtatgcgtcgcataactggttaactcattggtattaaaggctgtcatactgataatgtttgcctcttttaactgcacaatttttgccgtttcaatgatctttttagttccccctgaaagagagataaaaataaccgtgtcatcttcattcactaaacgtgtaaatgaatctgataagttataatcattaataaaaaagcaatgcaggcccagtgcaaacaataagtgttcaagataataaccgactgctttacttgttccccttgccacaataaaaatattacgagaatggcgcagtgttttagcacactctttaatttgctcttcattgatgagggtaaagcttttattaatattcttctctagttgttttttataagatgagtgatcactcttttctattttattacgcgaaagaatataattattaatttgaaactttagctctttaaagccactaaaacctaacttctgcgataaattaataattaccgtttttgatacaaaggttttagcgactaaatcattaatatttaaataggggatatcggcgatattatcggtaagatactttaatactttcttttcactgacggttaaattgtcataattttttaaaaaatccagcatatctcacctaatcaattaataatcatgataaaacaatcagttaagcatattacactctactgcataatatgcttaatcacaaaggtgatccattgcactattgagttaaaaacagatgcgcattatctcaattaagccttaatcactttgactgttgcatcaatatcgacttcatcatcagtaaaggttaatactttgccgtgataagtaatgatatcaatttttttcaaagtacgcgtttgatctgctgccgactcagatttaggcttaatactgttcattagcataccaaccgataatattgtattttctttatcaatatgcgttttaacgggtacttgttcgctataaacacgataagacttaattgacgttaacttaacgcgctctccggcaataaagatatatttactgtctgggatcacttttactgcataggctgataaccccttcatattggtcgtgggttcaaacgtgactattgcatcttttttaataagatcagggttggcaaccttaatcacatgaaaatagcgattatccccattttcatctttgataaatccaaaacctttatcttcaaaccattttgtgattgttccattcattgccattaccgcctacatgatcattattactcaattttctctatgcagtataaagcacaatctgcattcagactatgcctttgcctattagtctttaaattgagtaaataagcatattatggtttgagtcgccaatcggctgaaatttagctatgatcagtgcacttttgtgatcaggataatttgatgtcgacgattattgatacctttattgcccccacttgccatgacaagattgagtatctttatcaagatgaacatctactggtaataaacaaaccttcaggtttactaagcctttcaggtaaaaacccgcaaaatatcgattctgttcattatcgcttagtaccattgtttcccgagtgcacattagttcatcgtttagactttggcacatcgggggtgatggttattgccctgaataaagcgattaaccgtgcactttgtcaacaatttagccagcgaaccgtcactaaagcttatgacgccctattatgtggccatttgcaaaatgatagtggtgttatagaagcgcctatcgcgaaagatccacaacactttccacgtatgtcgattagcaccacacaaggcaaagctgcgcgctcttactatcaagttatcgaacggttttatcagactcttgctgatggcactcgcttacctttaacgcgcgtacgactcacgccggaaacaggcagaacacatcaattgcgtatccattgccaatatatagggcaccctattttagggtgtgatttgtatggtggcctattattatcaggaacagagcataccccacggctaatgttgcatgcctgtgagttacattttattcaccctgttagtgagcaaccgatggatatttatctaccttcgccgttttaatatcaagccacccttaaaatcaccacattaaatcgtctggcactttaaaatcagcataaggatcatcttcgtcttgttctgcttggcttaatgtgttgtttaataagatacaatctgcatctctttgcatgattttatctgccacactcgcaggaataatggcatattcattgtttccggcgctatcaatcactaaacgtgcaatagctaaacgaccattaattaattgagattgtgttactttatccacctcaagcgttttaatcacattattatcggtaaatttaaaatcaatatcgcccttagcaggggtaattctattcatctcaataagttgtttaacttgcgctttatactcttttaataaggttgcttgtttttgctgttcactgagttgtttatcacgctcaagctgtaaacgtttcttttcttctacagcctctttcgcttctctggcctgaacccgcgattttttcgccgttctttgtactttagccattttcttatttgtcactaatcccgcttttagcatctgctcttgtaaggtaagttttgccatttttatgcctaattttgctcaataatgcccgaaattatacctgtaatttttaagactgcatctcgttacaacaacgcaaattatcataataacactcataaccatatcgatgttatttgctgagtaagcgttgtgttaatcacattggctcccttaatgcattagggtatattgagaagtaaccaaaaaactttctctatcatttataacaggcaaaataaaccatggctgtgatccccaaaaactatgcaaaactagaaagcggttaccgcgaaaaggcgctaaaactctacccttgggtttgtggacgttgtgctcgtgaatttgtctattcaaatctgcgtgaattaaccgttcatcatattgatcacgaccacaccaataatcccgaagatggcagtaactgggagttactgtgtctgtattgtcatgatcatgagcactcaaaatacacagaagcagaagagtacggctctaccgttgtagcaggggaagatgcccaagatgatgttgggcaagcaacctataacccttttgctgatttaaaagcgatgctgaataagaaaaagtgatctaatcgttatcacgactgagaattgacatcctccacgccctaaaggacgtggatccctactgcgttcagactgatctctgaatcacctcggcgggttcctgcttcgacgggcggtctgactgcaccctccctccacaggcaagcacggcatgtcctgccgctaaaatgttacgtgccccgttgatatcagcattcgctgtatatccacattcaaggcactcgaattgactttgtgactggcggttttcctttgctgtatgaccacagcaagcgcacttctgactggtgtaggctggtggtattgccactacctgacctcctcgccagagctgcttgtactcaagctgacggcgcatttcataccagccctgctccagtattgagcggtttaaaccagatttagcttttacgttccgtccaggccgttctgtcgtaccttttgccgatttagacatgttactgacctttaagtcctcaatgacaatcattgcgtggtttttgctgatttcgctggtgactttgtgaaggtagtctttccttatattggcaatatgagaatgcagacgttgaattttgcgcttttgtttttgccagttggcactgaatttgattttacggcttaatttccgttgaagccttgccagctttcgctggtttactttaaaactgctgacgggcgggtataccgtaccgtctgaaagcgtggcaagttttgtaacgcctgcatcaagcccgactattgaggttgattcaggttgtggttctgtcgcttcatactcagtctgaatgctgacgtaccatttaccgcatgactgactgaccgtgacgtttctcacttctccgacgacttcacgactattgcggtactgcatccatcccaactttggcaatgatatacgactattggattgatcgagcttcacgccctgcgggtagcgaaaagcgtcatttttaccgcgtttcttgaatcgaggaaaagcggtacgtttctggaaaaaattcttgtaagcccgttccaaatctttaagtgactgttgtaacggttgtgatggggcttccttcaaccattgtgtctctgtgtcagatttccactcaatgagccatgaagccatttttgtatagggaatgtatttattccctgcttcgtaattctcattctgacgtgctaatgcccgattgaaaacaaaacgacaagcccctgcaaagcgtctcatctcacgctcttgctgaccattgggtcttaactggaatttaaaggcttgtagacgtttcatattatctattatactttggtctatgaaaaatgaaactaatattcgccgtggcagacattgtgtgttcctgatgcacatccatttggtctttgtcacaaaataccggcgaaaaatatttgatcaggatgccattgaaaaattgcgaggctactttgccagtgtttgtgctgattttgatgttgaattggttgaaatggatggggaacgggatcacgttcatttactgattaattacccgccaaaactggcgatatctaatctggttaacagccttaaaggggtatcgagtcgattacttcgacgtgatcgtcctgatattgcccaacgtgattactacaagggggttctttggtcgccgagttatttcgcggggagttgtggtggcgcaccaatatctattatccgccagtacattgagcaacaggaaacaccgagttagttaaaaaaccgcgccttatatccccgacctgaaggacggggttttacggtgctttggataaatcagatagtgcagtgtgttaatctattatagaacgttaatacactgccaataattcatatccccgccactcaatatattagtaaaactattatttttatcttatcgataactgactatcgcgctatcagaaatgttgaaattgtttaaatttaatatagccaattaaaaaaaatattattttttcaatagtttttattgtttccatgtggagttaaatggatttctctcactataaaaacactttaaattggttatatcacttataaacacgaaatattaaaaacattatttcaaacaagacaattattttagattaataatctagagaaataataacaataaaaagaaaaatggtgaaatatttataagaaatataattaataccattaaatatcaaatagttacaaaactttaattcgttataaaagcactagcaaaaaatttattttttatgtacatagtgtttactgggctgcgagcaatttgtctatttcttcatcatattttatgctaacaaacactttttatgattattttttcagcatgatatagcgatatttcaaccagtttacgctaagtgacttatcctagagagatacaacagcaaggggcggtttacagcctattgataagcttttattatcctttaatcaagtcttaccgtgcgcactggctaagatgacggacataactaacggattgtttttaagacaatcatttaatttaatttgtcatttttaataaaaggatctcattatgccaactccttgctatatttccattgaaggaaaaactcagggcaacatcactgcaggcgcgtttactgcagattctgtcggcaacatttatgtacaaggtcatgaagaccaaatgttggtgcaagcattttctcatgtggtgacagtaccgaccgatccgcaatcaggacaaccttccggccaacgtgcgcataaaccatttcgttttaccgtggcattaaataaagcggttcccctgctatataacgcattggcttccggcgaaatgttgccaaaagttgagctaaaatggtatcgcacctcggtagaaggtaaacaagagcacttctttaccaccacactgactgacgcgactatcgtgaacatcgattgccaaatgcctcattgccaagatccggctaaagccgacttcacgcaacttatcgaagtctccctctcttaccgcaaagttgactgggagcatactgttgccgggacttcaggtgcagatgactggcgtgcaccactcgaagcataagtcatgggttaaacgagtccttaggggctcgtttaccgttttagtctcctacttcccgtgaaggattattggatgtctataacaaattcaaaaaaatatcaaaggctgggtgataaggatggcaactcactgagtggggataagacattaacccatggcggtggcagaacatacgcgcaagatctcgctttacaagagcaacatagacaactcatagagaagatcttaagtggcgacatgcaaagtggcttagtgtttacttgtcagattggtggattacccgaagagactttccaagtcacgcaattcgatttacaagaagggatctcacaacttttcactctctccatccaagccgtcagtccactctcggaaattgattttaatgatgtgttaggcatggcttccagtttgacagtaaagcgagatggtcacattctgcgtacagtacaaggtatcttagcggcggcagagcaagggaataccgatggggtaaaaacctggtatcaatttgtgatacgtcctgaaatgtgggtaatgaccctcaaacaagatagtcgtatttttcaagataccaccgttcctcatattcttgagacattactcaatgagtctcacattaaatatgataaacagctttatcacccagaagagcatttgcagcgcgcctataccactcaaaaacgagaaacaatgtatgacttttggtgccgtttagccgcagaagaagggattaatttttggtttgaagaaggcccacagttattttatagcgaccgacatttgggcatgagagcggggatatccttaacctataacccacaatcggatacagatatcaccgatagcaccgccacaacgtggcgctatgttgaacaactctgtagcgatattcgcgttgataaagattacaatcaacttagaccttcctaccccttaagccatcaagtcacaggagaggttcatcaacaacatgaaatatttgaaagttatggacgctttgaagaagatgctcagggacaaccctttaatcagatacgttatgaacaatcacaaaatcagcgtcaagtaggctctgcgaccacaaactgcattgaattagcgccggggcgtatttttaccttgtctaaccaccccagtgcacgcatgaacaccacatggcaggtgattagtatctcacatcacggtgtgcaacctcttgccgacaacagtggcggtgaaggaacgcaattgagtaatcagctttcctttgtgccgagtactcaagagtggcgcccgccttaccgttttaaacctaccgccgatggtgatgaattagccactgtcgtcggcccgccgggcgaagaaatctataccaatgagcaaggtgccgttacggtctattttcattgggataggcgtggtaaaccagaccatagcgcatcatgctgggtaagagtcgctcaaggttggaatggggacggatttggctttatggctattcctcgtgttgggcaagaagtgattatctcttatttaaacaatgatatagataaaccgattatcaccggatgtacctataatggtcgcaatcgttcccccattgatttacctaaacataaaacccgtaccacatttcgcaccaaaacccataaaggagacgggtttaatgaattgcgctttgaggataaaaatggcgatgaggaaatttatcttcatgcgcaacgcgataataatattcatattaatcataataaaacccaatacgttgggcatgatgatagccatactgtcgccaataaccgtaagcatgaagtgtgtcatgacgaatttatccacatcgtcaatgagcaaacagtacaggttgatgtcaatcaatttgaacaaatagggaaagaccgtatcacacgcattgacaatagttggaaagaagttatccacgccagtcactttcaggaaatcggggaaaacaagcagtgtgatatccaaaatgattataccctgaaagccgcagggggtatccatacccataccaaaatccacaccttgcaagccagtgaaacggtcattatcaaaggcaaggctgggtcgattcaattggatgcacaaggtgtgactattacaggtaaaattctgctcaaaggcgatgtgtcaataacggggggcgccccagaagtggttactcagttagaagcggcggttaatgaagggttaccattagctgaggattgccgtgcgaaagcgatgaaaaaaggaacggcctaatgctcttgagtccaaatcccctctataaagcgtattgggttgctcaatgccgttatactcgcaacggtgaacaattcaagggggtgatgaccgtagcaggtacaagtcaaccacaagctattaagcagatgcgccagtactttacggctcacccaggtgaatatacctttgcggactatgacacattaatccctttaatcacccatattgaacaaagttcaaccttagaattaccgttaatacggcaagtacgtgagcaacataatgcaaaggtttcagccgtattagtggataaatgcaacctcacacacccaagaccgtcagaaaaaggcgacattcattaccgtgaggggcaacctatgtttattgaatattcgcatctctatgtcgtcattgacagtggggaataccaccgccaaaccgggcaacatcttgtaccgaaactgcatggctcacaactgccatggaaatcactctatcaaggtgaaactcaagacagccttgaagataaagccccttatttggtacacattgccgccaatcaagccggtcagcagtttctggctcattacttgaatttaccacataaagcgagtctcggattatttatcaatagcctcaaaccctttaccgatattcaccggcaaatgcgaaaactcacctatttatataatcaaaaactggagagttggaatttctttcgtttttatgatgttaagcactttatcccatttattgagtctttgactcacggacagttaattaatgtggtcaatggggtaaatgcgttctacggctatagtgcacaataccccgatggggttgaaatcacctttcacccagattatctgtatgacggcagtaagcgagagccgttatttattaatacctatttatacaatcactacgcgaatatcacacagctgcaaactgtggctaaagctaaggcactgattgaacaattttctcaggtagaaggggatgagttagagggtgacgcattaatgggctactgtatacacgcagcaaattgcagttttttagacgatattcatcaatcaaaagcgttattgtacgacttgcaagcccgctatttgtgccgtcatcaaccgagaacatggcagatcgccaatgaaaaagccgcaccttataaatacaaccaagttttattgagttaccaccgttatatcgcctgtttaaatacccaaggagaaatgaaatgactggagaagtgaatgagaaatatttaacaccgcaagagcgcaaagcgcgtcagatggtgaaggcggtaaacgaagcgagcccacgaaacttaccggccgacgcggtggtatgcccatgtgaaaatgaacatcgccctgtttatccggtgcgttatgcatataccaacttttattgtgatttacatttttctacaattgaacaagcaccaaataaaacgttagaagcgagtattcctccttctattaatcaattattgaatgcgaaagatgttactgctagtaaaggattttctgcaagattattaagacaaggttgggtttatgtttttgaagaaggcaattaccctactagaagtaattctagtaataaaagttatcaagaacaaaatgttgatgcgacaaaaggacgcctattagtttttcaacatcaagttacaaccagtgatggcaatgaaaatttcattccatatatatttaagcaattaaaaaatgggggtgtcactttaaagaaaaacggaaatagtaatccttatttagctataccgaaagatgtgaaggaagcgactatcttattcagcgaaagtaaattatctgattacacacttaaaaaaatcatttcatcttctaagtttagatcgaaattaatgcaaaaaatcaattttattgattacaacaataacgattattgtattgagctaaataaagataatttaaatcgacttgttgaggattataaagaagaagttgataaatttaagctatttgttaaagaattcacgcattcaaatataccctcttcttttttttctgataccacaaaaatacccgacttaccacaagatgcaactgttttgattaatcaaataaatagtgttctagattataatgaaaaagcgacattgcttattttaaaagatcccgtaggataccaaaaagatgttttatcttattataatattgtaacaaaattacatttattatatcagaactattatagccatccggataaaattggccaatttattacgagtatacaagaagctagtcatcacattaaagatactgatgaaaaagaaaaaatgcaaacaatactaaaagagagtattaatcagaatgcattagataatgagtggaaaaatattcataaaacatttattttttttgagaaacatcaacgtattgtattatcattgtatgaaagctttatgaataatccggcaatcattaatgaaaacggtggcttaaaacattattttgattatgctttttcatatcacgaacgtataacgaaagaagatgtctttagtattgatttttttaaggaccttaatcaagcttttgatttatattttgatttaatatctccattaatgaattctaccgaaggacaaagaacattagataaattatattcaattaatgatgaagaaaataatagcctgtgggtgggagtgacaaagaaagtaattagtcttgttgctaattcaaaaattatggacgcacttttaaatgcacaagaatatgcagagaatatcgaaaattttgttaataagcttgcgtttatttgctcagatagcattggttttgcatttacaaaaacaagtaagatgctttctcattacgatattaaaaatagactaattaatactaagggtattgactatttagctcaaaagatacttccgatgatactggcattttgcaacacaaaaatttcattaaccgagtttgttaaattatcgggtaatgagcttaaccagtgggtggaacaactccgtaaattaacggaacaaatagtaccaaatctgcaacatcctaaattaaataagcttttttcttggaaacaaaaaataataaatctaggcgaagagactgccgttcttattccgaagattgagatcacagatattactaaaaataagatttatatttatggtaaagatgcattacaggtttccactaagctatttttaaacggtttcagcatgatcaccggatcaatccaagcttatacattacaaggtatgagtttgtatgaacgtaatgacccattaaaactatccccctataatctgtatacagcacagattattgcgaatttatttgtagcaagctacagtattttaaaagtttctcaagaggcgacaaaattatctcaaacagtatcgagcaccacactgaaattctttttagataaaataaaattacctatgctaacaacagaagtgggaaccaaaagaatggcagcattaggtaagattgcaggtgccgttggtgttgctcttgccactcgagatgcattagaagcttttcatattggaaataataaacaaggtttatcaaatgtagccattgccattggttctttcatgctaatttttgttacagggggatgggctctatttgcaggactgctaatattaggaggcttcttctcaagtcaactcaccagttggagtcatttggaaactttgctaaggcacagtttttggggaaatgaagaaagttcaaatttttgggataataatagaccaacaccgataggagaacaattaaaacaatatataaaagaatttgaattctatgaacaaaaagggctaattgaattacaagagttttataatctattttatacagctaaaatgactcaagaaaaaataccaaatggaaaactccgcttatcttttgaatttactaattttaccccagggatttcagaagtatattttcactttgttacagaggttggttatcacagcggcttggcagaagaaataaaaacacctagttcagcttatgttctaaataaacgaaaagacctcttagaaattagcgaacaattaaaaatggcaagtgaaaaaggtgattggaaccctgaaacaggtatattgaaatttagtttggaagtacagtctcaattagtaaatacatattctgcttttggtgcacatcctaatagccgtataggtattgaagatttatattggtattatcaagtcaatcccgaggtaacaacaccgatgcgttatatcaattgggggggagatacccaagaaaacaatcggcttttaggctttattaacagtgagaatatctaatgagtatttttttcaatcccgctaaacacccacatcgcttgaagccacaaccattgggggagcaaggtgagcgctataacgaagattggcccatgcctgagctcgattttttagagaccgtggataaacaacagtgcattctggttgataaagaaatacgccgacgtgatgcgtttgctttccctgggtttattaccggtattattacctttattatggtatttcattttgtttttacagaacataattcaaagtatatccgttttaataaaaatcttcatgactatacattagaatataaagcgcaatatgaagataaaactcaaagagataaactaccttcatttatacttgataagtacgccccttatttcaatcaagaaaaactgtctattttagattatattcatgtttattttgggggacatattacatcaaaaccctatcaaaatacgctattttttctttctactttcatcgcacctttcttcttaattggcttgggtggctatcaatcttttttcaaaaaaaatccaatactcgtttttaatcgtgaaagaaatctggtttatacttggcgcaaaaataaggtatttattgcccgctatcctgaaattggtatcggtaaaattggtaaaacacttacctttcaattattcgggttagataagtcaaaacaaactttagtttctgaattatttttccctaatgtctatgtttattcagtgtacaataccagtactgactatcacgaccagcgcttcattaattttatcaatacttatatgcgcgaagggcgtgatgccattattccattcgattatcaccgtaaaaaacccaaagtgtattttggcaaaaacccacctcctgctgattttgagcaacaggtcgaacagattttagcaaagcttgatcaggagaaaaaacaccatgcgtagtttggtaaacggcagaaagattattttagaaaatgatacaacaaataccggcggtaccgtacttaccggctcttctattgctaaacaaacccaagggattgcctgtgtaggtgatcctgtttattgccctgcgtgtaaaaaaacaggcactattattgaaggggataatttaatgaaaattaaaggtatccctgtcgccctcgaaggacataaagtcgcttgtggctgttcagatggctgtatactcgttgcaacagattaagcgatacccaatatcatgtatcataaataaaaaatgatattcttttttagaaattaattttgccataacacaattatcagtaaatttaaattcgatgttgctattcatctaaaaaaagaaagtcttcaactaaatagtagttttaattttatatacttttattctcacgttgaaattcgatgggtcaaaatatgaaatatcattccttattaaaaaatttattttatgcaacactttccatcatggcgttaaattttagtggcgtcactatggcaaaaaataccatgaatgagatttatgttattaatttatcctcaaatgatgcaggttgtggtataaaaattaatgaaatgttggtaatggataataaaaaataccctaaaggtcattattccgtcggtcaaaatatatctagcatattaactaatggggaaaataccttaggtgtaattatgtttaatggctctattttaacaggtgaagaaaaacttacccctgatatgtggtgtgaagtcgaacttaagaaattatctgcaaacggcgatacctccttaatatcgggacttagattaaacggaaataatgatgggaaaatggtggtctctgataaatatcaaaataacagtgagcaaatctattttggtggccccagtagagatagtgaatttgatgttttagaagcaaaaaaccaatttaatatacagggcctcccccaatggcaatggggaaaagctactcccgttactgaagacgatattcctaaaattcgtgctttttatgccgaactacgacaagcatttatcgataaaaatctagataaattaaaaactatggggaaaatatcctgggaagaaatggcctatgccgataatggctctcctgatatcttttggaaatcgcttaattttcaagaacgattagaacaaggatatagacccaatccaataagttgggaaaaatatattcttagtacttacttaaatcaccgtatttttcgttacgaagctggatttgaacgcttatctcctattgagttagttagccctgaagggaaaaattatttttataacccttacctttctattattgatgggaaagtgactattgtccgataaggtgcttcttttatgcctaccattattcttataggtgattcggacactggccatgatcatcatggccaatacactttaaagtcacactattactcacaattccctatagagtaatatttatcaaagataacaatatacttacgacttttttgacttatgcgcagatctttaatttgttgattgggtaataaataaaatacataaggctctgagtcatcatcaccatcacaattttgatgtaacaaaaccctaaaataagtattgcctgtattttttaatattccttggttaatatttaaatcatatttgaaatctggatctttaggtctaacaacaaaataggtttctaaacttactgtggggtagaacagtggttgttttttttgcccttcatcatttcttatatcaagtggcgtttcactaataataattttataataacgttctttttcatccgcctctcctcgatagaaaattttaaaaaattcctgctccccgggtaatagaatttttttaaggggagtaaaaagaatttctccattctgaataggtgtgccctgctcttgataacccggcctatcaatttggtaagcactaaatgtatataaattggtttttttagtatcattaatatagggcttagaaaagaagggttcccccgactccatagaggaaatatctgcactaatataaagtgcatatgcatggtgataaaagaagactaacaacatcccgcaaagtatcttaaaccaagatattagtttcatattaaaatttcagtattcgttataatagaaagcgacttaaataaaaaaccagtacgttcttatcagtcgccataacataaaaataatcaactttagttaatatcaggcccagtccatatagccttaaccgttacccttccactggctgagactgttcctagccaatcaataccatctaaagtgaaaaatgagttagcatcattcattggaaaagataaatctaggttcgttctataaaaagagcctaagtcttcatcaggtctatcccatggtgtttctgtccataacgcattttttaatgaaatttcatgactatcacaactcgctctatattttgcatccgtgccatcactatttttaaatgagagataagccggaaaaggcacattaagtcggttatcactggaggagaataaacaataggattgcccttttaatgttgtttgtggtccttctacagatgcagtaatagagtctgcttgtctagggccactggtggtaacaatataattaaactcaatgggtggctcttcattacccacttttcccgttttagattgatgagggttaaaatcagcaggaataatgcttatgccataatctctcggtttcagaataagtgtatttgagggggtgaactcataatacccagattgaggcacggctgtattggtaaatgaaaaggtaaaaaagtcttggctatttttaaagtcgacattactagagacgagtctttttaaaaaggtattagataaaaagatagaaacatttttattattaactttaaaataataattagcgggatatgttgtattataattataccagttattactgccatcatcggggccaatttttattgtatttgccgctggcgtaaaagggatcagtgtattattaatttttaaattaagcctaatattggtaaatatatccccagtagtttcatgatcaatcacctgacaaataataccattttggtttgatacaatacccactcggcaaaactgagagcctaagccaatcgtgggattaccgttactatcaataaatatttcttgtaaagcacctgttgaagttaacgtgatatgccctgacttagtgatattgaattcatgtgatgcaagcattctgccaccaacactttggcaagatccgcctttgcttggatcatagtctgtttttgtcatacaggctctataactatatgtctctatagtgcctacaggtaattggcgaaaatacaggtatgccgaatcactaaatattccccgagcataagccgattcaccgttagtattcgtctgtactattttataagccccgtctttacctatatattgcgcaggccaatagccactatcatctgtacaataacgcctcatacatcggttacccacaaatggcttatctatttgagaattttctagccaaatatcgacatattgattggcctgaatggatgtattggtataccccatataacctaaactgagctgtgaagattttgaataacgcgtatatttattggcacccgaaaaacgcggatcggttgttcttggggtaataaaatattcattatctacattattctcaataaaaacgtaactattagttaccgtagcggcttgactggttgtagacagcgataaatttaaaagacaaggtgctacgagtaaaaaaaatattttgctattcataataaagttctcgttatctttttacgaaactagactgaggttgacaagttacctctccaacccacattgctccttgtgcccctttaagatctaagtctgcttcacagattgtttgctgatcttcttgtagtaacgagatcaccggataacggacatctacatccattgaaaactcaccattttgatctgttttagttcgaccaatatgatttcgaattgaagcatattttaaaagttcaccattaggggatttcagacgtccgaaaactgtgactaattgcctcacttccggttgataaaaggcaatatttcctggatacaatgtgacggatttatttcggccagaaataatgtcaaagctgtctttcgatttgccatcattcattaattggatgtcataatctgaataaggagataatggaataaaggtattttttccactaatcgggtaattttgcccattaactttagcgagcatactgccactacctttaatatctgaattgataataatgccagatttaccttgttgaccactgggtgtgatcatcccttcactataagctatagagccacgagaagttaaattaccattgagtcgtttattatcagggcgattaatggtcaccgtaccagaattatacttcgtatcataagaagcgtaacctagtgttgagaagtcagattcaccattatctttatcatgtactaacttagaaacagaaacgcccgcattagtgatcacggagttttcaaaattcttattcacataaatattggcttttacattgccattggttgaagagatcccagtacttaaccacgttgaaagaggtaaagagaaatcaagattaataaatttttcattagtgctattttgattatcataatgataacgctgaaccccagctcttaatcctaccgtgccataacgtcccgaaaataatgtatttgcatattcataattaatagaatcactaccaactcgcttatctttggtattgctgatagtaaatgaacccgttctatccattatcttatcgaaattaatagttcctccataagagtaactgtcagcctcatatagcggtaaatcacctcttacgatagttttctctttagatgcccataatgaaccatagccttctgggatattaatagaaagcgtactaatattacggtgactaccatgattctctaacattccttgccaagcaatagaaagatagttatttaccgctacactgatattcgtctcctgtacaataaatttatcaaatccatagttagacatttgaaaacgaataccggataacacaggaaagttataagcaaaagagctaccgattaaataacttttttcgggagtttggttataagagccaccctctttgatataatgacgtttatcaaaatcaatatagccaccataaatttcccaatttaattggtcaaaattaccgttagcggtgccaaaagacttattaatggtttgatgttgtgttgtcactaccttgccatcaataacggtttcaatcgttacttcataaataccataaggcaacatgctggtatcaacttcaaaattacccatcgggaaattttgaatatttaataatttaccttggcgataaatacgaacttcacctggactatttaaaaaagcataaatcggagttaatgattgctgtttattcaccaccctacttgatgaattattcccgattgatgctgcataaattttactgctgctcaatactgttaagctggctaaggactgtaaattccaagtgctcattaacccgatagcaaaacgcaatccattaaaatcacgttcatacattgctctatagagttcaatattagaattggatttacctatactgtaggcagatgcattaatattaaaatggtgttcagctttagctaataacgtgtctaaattaaagtagctactggatgaatcttgggcgtttttaacacgactttgaaagacgcccaaatcatagttggccacagcagaaaatgaattaacagatgaatttcctaatatggattgtctagcatgttctttgggtgcaaaagctgacttatcaacatctaatgataaattaaatgaagagacatttaattgaagagcagcattactatcaatagttatactattattttcattaaagatagcatttttttattttcaattttatcaactaataactgatttagtgttgcgccttgattattttcgattaattgaatacttgatagttttattttatcattatcgataacaataatcgcatctgcaattttcttttcactttggttttgtttatttgcatcattaagtcgtaagaaaacgggcaccgacataccttcctctaaagcattaacaaatgccggaggaataatatatccgcccactttaattctttttatttcattagcattaatcgtattcgaaaaaataatacctaatattgataaagcgataatactcttacgcatgatttagcccattctttattttttatttgacaacaatgaactctcctttgtgccaaatgcctacgctagattttttatttgtgagatcgacaagttgtaatttaacggctaaatgtggcataaggtaataacgctcgcgacacatcccctccacaccatattgttgtttttctgctagacaagggcctgaagccacaacacgaaatgaactattaccgatattagaaactttattatcatgatactgataattaaaattctcaattctgggtgcaaccactaaaattgtactaatagttgcagatgttgttgctgtcgctgattttgagctttgtgttataccattttcagcaataggatcatctttccaatttaatcgataataacgctctttatcatccttaggcccttgataaatgattttaaatacatcacttgcatgaccgggaagaatcagattagccggtgttgataaaatttcattgggatcagtaaccggaataattttcccattttcaagtggtgagtctaatttttctattgtcaaattgactaatcttgccgtatttactgtattttcaatttctttggcaagactactttcatcagaagatattatctctgttatattacctacatttactgcaaaactattttttaatggaaaccataataataaaaaaaggattaattttatcttattcataatagtcagtttctaaaaataaataacgataaagatattacttccctatagtatctttatcgtaatatcaattagccaataaaggagaattaaggttctggattaggtttaacggtagaaaagtcaccatcccaagtggcagtaaattgcacttttacatcaccatcccagacaccatcagccagtgatttaaaatcggctgttgctcctgctgcttgtgcactggcaattacaaaagtgaattcaccacgatctgtagcgcgctcagagccattgtaaataccatcagcagctaaattatctaaacctgaggttaacccttttgatgtatcaattaacacgacatcagttgttttagaaaggtcttccccattccatttaacaccaactgttaatgttgaatcatcagttgttcttgctaacgtattagcaatcagttttgatgataatttaaaatcggttgcgccagattggccttgaatagcaatatcaaatgcaccattttgttggttaaatgatttttggccttcagcataattaaaagtcagactttttaatggagtgacaactaacatactggttgtatctttaattgcagttgcttgccaagtcgcggttgcttgtgcaacacgagtatctgcattagcagccgtagcaaaagaagcagcaataattgttgatagcatcaccgatgctatttttttatttaacatattattctctctaattttgatttataaaaaacaattacatagtataaaaaacacctttaattgtgctttttataaaatataattaataaaataattgcaatgataattattttatgtgatttattaatttttaatgtaattaaaagttatttatgaagttttttgtttgacaacctttccataaaatatatttctttttattatcgactttgtttatttctctctcatcggaaaattcattttcaagatatttaaatacatctacccattttttatctaaaattaataaaaaatttgctaattgatcaacggtaattgcagtagctcctatttcatatcgtgaaatttgttgttggctaacattcattaatcttgccaactgctttcctgtcatatttttttctttacgtgcttttcttaaaaaaataccaacatgaccactaatcatattagatttcattaattacactccaatagaaaattgttaactaaacatttcatttaaatcaatcataaatatataaaaataagagtaaaaacgtttataccgatcgaagttagttaacttaatagctacaacctatcaaatattggttattgatcgatttaatttattagcttacgcaaataatttgtatttaaaagaaaagatttttattaattatatgataattaaataaattaagtttttaattaaaaaataatttaaaaaatatattttttatagaattgcagaaaaataaagaataatgcattattgatatagcctaattgatatatttgatcatatacatttacaatttgttacataattcatcaaatagcgatttaagtactaataattagagtactataatactctgataaaagcgcatttctggttgaatatcctgtaatcacatttattaagaacacttaagaccgaaaatagcacttaatcaaagaattagtatcaatatatttgtaaagtaatcacatgattttaaatatcttttttaattccattaatactaatataaagtgtaaaaacacattttaatgaaaatagagatcaattttaataagtaattatattactgattaactagattattgatttagatcaataatagtattctgttattatattttcattaatctttaacggtaattaaatgcctaagaagttattttaataaaaattatatatataataatgcaaaaatatttttctttgcattaataatatggcaagaagtttatcaatatatcgattataaagatgatgtcgatttacatgaataattagctgaatgggaggctttttataattgtcatcgccctcactcagcgcatgctggtaaaacaccgtatgaagtgttaaaaaataagcttagtctttaagactaaacgtcagccgaggttttgagtgacacagcgtagagatttttatctaggaacattctatccgtagtggtaatttcacttatttttagaggatggtaaatacactacttatcttattatcttacttaccttttttcagcaaatctttcaatgctgcaatattcgccctcgccccttcagcttcttttaattgtcgacgtttttgagcataaatatcaaatacttctctggctttttcatcagcggctttcttactaattccacctgcgccttgtaatacatcacggtcattgaaacttaaaaactgatctagcttagtatcccaatcttgtaaaaaaacttgcttacggcgcagcgcttggtcttcagcaaaatccagccacatattgacgatacggtttaattctttcagctcattttcgcgtagataattcttcgcaatcgtgacatcggttttacgcacctcatcaaatttatagttggttaagcccatatccggctgactggcatctgcgcgactagctataagctcagcggcagtcatgccggtacaagcaaaatgtaatttgttttggatagattggaagaaacgagttgtttctttattggatggttcgtaatccgctgccatggtgaagatctctttcacccgtaaatacacccgccgctcactggcgcgaatatcacggatgcgttcgagcatctcatcaaagtaatccggcacgactgactgaccgataggcgggtttttcagccgttcatcgtccatcacaaaccctttgatcagatactgttccagcgtttgcgttgcccactgacgaaactgagtaccacggacagagcggacacggtaaccaacagcaataatggcaggtaaactatagtggtctatctctctggaaacctgacgatttccctctaatcgaactatccggaatttccggatggttgcgttttgagcaagttccccttcagagaaaatattaacaaggtgctcgttaattgtacgaacgtcttttccatacagctcagcaattgatgattgagataaccacaacgtatcagactcaaagcggcattcgacacgagtttgaccatcttcactgcggaacaaaataaattcaccctgtggtgcttcaggaagattatcactcattacatggcctccgctctatacgttatgcataaactgtgaacaacaatatagcatatttaacaaaaaaataaggccaccagcaaatagatagcaagcacattattttatgaaaaaacaatgtaatacgatcccctatactatccatctttctgaataatattcgtacatttttcagtcatcacccatagcgccttattcaatttactatcactatcaataccattcaccgaacatgtacgagtatgcttacttttcacatttctgcctaatagcactcctgtgagtcaattctcttgcaaacgttttaacatttgttgaactaaaaatagcttaataactgatcattaagggattgattgagttttgggaggtgtaatgaacttaagtggcggaagatcacaggagtcgaacctgccaaggaccgctggcggccccatctggatttgaagtccagccgccccaccggggacgatgatcttccatataggattatttgtatgaaataacatgatgattatacgctgaaataaaatcattcccaagtgcactaaatcaataaaacctctttcaaagaaaataatcccgcttttgagtaaaaaaactgataattaacgcgatactattgaacttatgcactttcatcctcatcttattacctatgacgaataaactcagtgatgtatgccatgtcactgtaaacccagatacaggatgttttttatgtcaaatccattacttagcacaacgggattacctgcattttcccagatagaaccaaaacacgttgtacctgccattaaagaagttttagctaattatcgtgcaaccgtagaaaaacttctcgctgacaacaccgcttttagttgggataatctttgccaaccgttagccgaagcgggtgataaactttctcgtgtttggtctcctgttagccatttaaactccgttaaaaatagcgctgaattacgcgaagcttacgagcaaagcttacctttactgtctgagttcagtacttggatgggtcagcacgaaggattatatcaagcctataaatctatcaaagaaagcgctgattttgccttactgactcaaccacaaaaaaaagccgttgagaatgcgttacgtgactttgaattatccggtatcggtttaccaaaagagaaacaacagcgttttggtgaaatcagtgcacgcctatcagaactgagcgccaaatttggtaataatgtgttagatgcgaccatggggtggtctaaacttatcaccgatgaaagtgaacttgctggtatgccacaaagcgccattgatgcagccaaagcaatggcacaagcaaaagagcaacaaggttatctattaacgctcgatatgccaagctatctacctgttatgacctatgctgataatcgtgagcttagaaaagagatgagtattgcttatagcactcgagcctctgatcaaggccctaatgcaggtcaatgggataatagtgaagtgatggcggaaattttagcattacgccatgagttagctcagttgctcggctttaaaaattatgccgaaaaatcacttgccactaaaatggcagaatcaccagaacaagtacttaatttcttaactgatttagcctctcgagctcatcctcaaggcgaaaaagagctggctgaattaacgcactttgccaaaacacattatggtgtggaaaaactagagccttgggatctggcttactacagcgaaaaacaaaaacaacatctattctccattgatgacgaacagttacgtccttacttcccagagcaccgtgcattaagtggcttattcgaagtggttcaccgtatctatggtttaacggctaaagagcgtcatgatatcgacacttggcacgatgatgtacgtttctttgaattatatgatgaaagcaacacattgcgcggtagcttctatcttgatttatacgctcgtgaacataaacgcggtggtgcttggatggatgattgcattggtagaatgcgtcatgctgatggcacactacaaaatcctgtcgcctatcttacctgcaactttaataaaccagtaggtgataaacccgcactctttacccataacgaagtaaccacgctattccatgagtttggtcatggtttacaccacatgctaacgcaaattgataccgctgatgtatcaggtattaatggcgtaccatgggatgcggttgagttaccaagccaatttatggaaaactggtgctgggagccagaagcgttagcctttatttctggccattatgaaactggcgagccattaccacaggctatgcttgataatatgctcaaagcaaaaaattatcagtctgcgatgtttgtattacgccaactagaatttggtctgtttgatttccgcctacacgctgaatatgatccggctaaaggtgctcgtatcatggaaatactaaatagcgtaaaagagaaagtctcggtagtacctgcaacaccttgggcgcgattccctcatgcctttagccatatttttgccggtggttatgcagcaggttattacagctatttatgggctgatgtactggctgctgatgccttctctcgcttctctgaagagggcatttttaatcgccaaacaggtcaatcattccttgataatattttaacccgtggtggttcagaagagccaatggagctgttcaaacgcttccgtggtcgtgagccgaaacttgatgctatgctcaaaggctacggcattaaaggatgatatgtgaatatctgtttactttgtgaagaaggcgctgataacagcgccttatctgctttagcgcaacgttggggattaattcacgacgccacacaaactatggcgttagtcttaacgcccactcaccttgaattgcgtaaacaagatgagcctaaacttggtgggatctacgtggattttgtcgcgggtactatggctcatcgtcgtaaatttggcggtggtcgtggtgaagcggtagcaaaagcagtaggtattaaaaaggattatctacccgatgtggttgatgcaacagcaggattaggccgtgatgcctttgtattagcctctattggttgtaacgtaagaatggttgaacgtcatcctgtggtggctgcattacttgaagatggcttgaaacgcgcttatctcgatgcagatattggtgagtggatgcaacagcgtatgaagctcatttatgcttcatctgcacaggcactcacgcaaattagccctacacctgatgtagtctatcttgatcctatgtatccccataaaaccaaaagcgcattagtgaaaaaagagatgcgggtattccaatctcttgtcggtgcggatgaagatgctgatgcattattagcaccagccatggcactggctaaaaaacgagtggttgttaagcgtcctgattatgctgagccgttaaataatcaacccgcacatgcaagtgtcaccaccaaaaatcaccgttttgatatctatccttgtatctagccatagataacccatagaggggcgtgtctccccctcttttcccgtaactttttaattataatatcgctatctattgaatagtatatccaccatcaatcaccagattatggccattgatcatatccgctgcagcgcttgctaaaaatacagccgcggcagcaatctcttctggctcagcaaatcgccttgccggtatttgcgctttcatctgttcacctttttcaccttcccaagcctttttacctaaatcggtcatcacaatagtaggggatatcgcattgatttgtaggcctttgggtccccactctagcgccatcacctttgtcatattgataatagcggctttacttgcacaataggcaatatgttctggtaaagcgataatacctgcttgagaggcgaggttaattatcttaccttgcccgcgttgtagcatatgctgccccacttgctgacacagtaaaaaagtccccgttaaattaactgataaggttttattccaatcttcaagagataacgattcggcgggagctaaagcgacaatacctgcacaattaacaagaatatcaatgcgatcgaactcttcaatgactgaatgtaccgcttgttttacggactcttcacttgaaacatcacaccagatccccaccgcactatttaaacgatgcgccacttgctcaacctgctctgatctatccaacaaagcgactttagcccctttttcgataaacatctgtgcgatagataagccaattccagccgcaccaccagtaataacagccactttattcgagagagtaaaatcaatttgcgtagccatataacctccagcttaaaaataaatagtcactcttttaagcatagcagatgaaaattaggcctaagagggaagagaaaatgattgaaacggtcagagcgagcgctatgcactcgcactaacttaaaaaattacagcacgccttgcgctaacattgcatcagcaactttaacaaaacctgcaatattggccccttgaatataattagtttgtttaccttcaccgccatagtttacacaagcgtgatgaatatccagcataatatgatgtaagcgagcatcaactttctcagctttccaactcaagcgtgctgcgttttgcgccatttctaatcccgaagttgctacccctccagcgttagcggctttacccggtgcaaacaagactcccgcctcaataaaagcatcggttgccgcaatggtcgttggcatatttgcgccttcggcaacagctttaacaccgtttttaattaacacttttgcggcgtctaaatctaattcattttgtgtagcacaaggtagtgcaatatcaacagcgacagcccaaggctgttgcccttcaagataagttaaaccaaactctttggcgtactcttcaatacgaccataattatttttaatttcagttaagcgagccagtttttcggttgtaaatccagcttcatccaccacggttccgccagaatctgaagcggtgaccactttcgcacccagctcaaggcatttttcaatggtgaattgtgccacattgccagcaccagaaacggctacacgcattccctcaagggacatgccgtgacgtttaagcattgcgttagtaaaatagactaaaccgtaccctgtggcttctgggcggatcaaactgccaccaaatgataaacctttacccgtaaagacacattcattgctattcgagagctttttcatcattccggccataaagccaacttcccttgcccccacaccaatatctcccgcggggacatcagtatcagcccctaaatgacgatagagctcagtcattaacgcctgacaaaaacgcattacctctgcgtggcttctccccttgggattaaaatcagatccccctttagcgcctcccatcggcagtgttgtcagtgcatttttaaaggtttgttcaaaacctaaaaattttaaaatagagaggtttactgatggatgaaaacgcattccacctttgtagggaccaatagcagagttaaattgtactcgccatgcgcgattaacttgaacttgtcctttatcatctaaccaacagacgcgaaactgaataatacgttcaggctcaactaagcgctcaagtaatgattgttcacgatattgtggatttttctctaaaaaaggccacagagtggtaaaaacttcacgtaccgcctgatggtattcaggttgatgagcgttatatttttctacctcttctaaaaacgaagataatgagccagatctattcattcagctattcctttttatgtaatgtgatgttggcataacctcatttattcggaatatttttgggatttatgtgaggttgatattgttttgcctattgaatatatcattaaaatgtattcctacttcaagacattttttttacaattagacaaaaaaaaaagcttgacctcactaaaggctaataaaatcaggatttttggacaaaaaaatacctgcataagcaggcattttttttgcttaaataatcagttgattactcttcatcatctttcagaggaacaattaacatatcaacatgaacggtattaattagttgacgtgctgatgacatcaatttgctccagaaatcttggtgatgaccacaaaccactaagtccatatcgtattttttaatcgcatcaacaagaacttggcctaaatccccgctaccactgagtgtttcttggatctcataacctgagttatcagagagatcttttagtgcattacgtgtttcatcagtgatgcgttgttgcatatcaccaaggttaacatcaattaaaccggtatacagatcagagtagttaacatcaacgtgaattaaggaaactttggcattatagggttttgccatagatacagctttctgcaccaagacgttgctctcaggggataaatcaactgcaactagaatatgcttataagccatcgtaaactccttccataagctgattaatcggtcggaaaggctattacgcctatatcctttacattaaatataacgttttatgatgaaagttagatgttgccttgatcacaacttagtgcaaataccatcaaagaaagcatctatcggtaacaacaatatacaccattttaaataagtgaggagtcgttcttcgacaatatccacatattaatgtgaataatgcacaaggcacaataaaaacaccctattagagttattttttaatcatttttttgaaaaagcgaacaacttgaacaactcgcttttatttcttgcttaatatcacctagacttaaataagagaaaaattaacctttccatgtaaatgcaaaaggttttctcatctcagaatcagctattctagggaggggattatgtttagtgtcattgttatcttttgggcgttgtgtattctttgcctgattaatatgatgcgttatttctcatcaattcgggtattactcaccatattgcgccaatctgatccattactttaccaatctgtcgatgggaatggatttttcactatgcatggtcaattttcaaaacagttaagacttattcgatatataaatcaacgccaatatactaaccaccatgatcctgaagtgattatgcgttgtgaacggatttatcgacaattctacctagtaagtcgcttttgtattcttgctgtagcaagcttgatcgccatgattatttggtaggttttatagggataaaaaaacggtgacgagttagtcaccgtttctcaatactattaggatgcttattattatcagctattcaccagcagtgaaagtgaaatccaataaagcacaccggataaagcaatactcactggtaatgttaagatccaggccagcgcaatatttttcacggttttggtctgcaccccaccaccatcaacaatcatcgtacctgcaaccgcagatgataacacttgtgttgttgatactggcatacctgtataacttgctacaccgatagaaactgcagcagttacctgagcagaaacaccttgcgcataagtcataccttttttaccaatcttctcaccgatagttaccgcaacgcgtttccaacctaccattgtcccgatagagagcgctaaagccacagagataatgatccaaattggtgcatattccactgtatttagcaggtcacgactcaatgtttttaagaaccgtgcatcttgggcgctagtttctggtagtttagcaacttccgtagctgtatcagcaatacacatcagtaagcgacgcatttgagcacgctggtctgcactcagctcatcataagagctaataccagacaacatttgttctgtttgattgagaacaattggcgttcttgcgctattacaatgaaaatccgtgtcgttaggatcagcttgtgctgatactaccggggtattttcaatcgcatgttgtagagctggttgatgcttctcataatactgttgtaagtgtacaacggcatcatgagttttagtgatatcgtatccgctagcattcatattgacgacaaaccctgctggggcgacaccaattaaaactaacatgataagaccaatacctttctgaccatcattcgcaccatgtgagaaactcacccctaccgcagataaaatcagcgcggtacgagtccaaaatggtggtttgcgtttaccatcttttttctcacgttcggcaggggttaggtggatacgacgacgttttttcgtgccactccaatagcgacgtaacaagaaaatcatcgcgccagcaatcaccaagccaataattggggaaaggataagagaaaggaagatactgatcattttaggtatgtttaatgcatcaacgattgacgagtctgtcacgatagcatttgttaaaccaataccaatgatagcacctatcagcgtatgtgaactggatgctggaataccgaaataccatgtacctaagttccagataatggcagctaacagcaacgaaaaaaccatggcaaggccatgagccgagctcacatttagcagaagatctgtcggtaataagtgaacaatagcgtaagccacgctcaatccaccgagcaaaactccaaggaagttaaatacacccgccatcacgaccgcaaattgcgcacgcatagcacgagtataaataacagttgctaccgcatttgcggtatcatgaaagccattaatggcttcataaaatagcacgaaaatcagtgctaaaaccaacattaaacctgtatgaaattccaggtcagtaaacaaatgtagcatagacgttaagccagttagttggacatgaacgcggcgcattatcagcgacaaatgcgaacggtggaagcgaaatttaacctttttttgatttgataaccaaggaaaatgacgggtttttaagataattccttatatatcatttaattaataaacataaaaaaaaagtaaatttctgataaattttttgcttgcaaatacgaatttaggtgaaaaatacagatttctccatataattttacaaaatactctgattttacacgaagatcactgattaagtagtcagagacaaccaagaacgagacatcattgtgggatcattcgatacagttattataggtgcaggggccgctggacttttttgtgcttctttagcaggacaagcgggattatctgttttagttttagataatggcaaaaaagccggcagaaaaattttaatgtctggtggtggacgttgcaattttaccaatatgtatatcgagccatcagcttacttatccgataatcctcatttttgtaagtcagcacttgctcgctatacacaatgggattttatcgagttagtacaaaagcaccatattgcttaccacgaaaagacgttagggcaattattttgtgatgattctgcccagcaaattgttgatttattactcgcagaatgccatgaaggaaaagtaagtattcgcttacgtagtgaggtgactcaaatagagaaaaccgccgaaggctttactcttttggtaggagggaaaacaataaccgcctcctctgtagtgattgccagcggaggactttcaatgcccggtttaggtgccaccccttttggctataaaattgcgcaacaatttggccttaatgtattgcccactcgtgcaggcttagtcccttttacattacacaagccacaacttgaacaactcagcccgctctctggtgtggcgatccctgctattgtcaccgctgaaaatggcacccaatttaaagagaatattctttttactcatcgtgggctttccggtcctgctattttacaaatctctagttattggcatgcgggagagaatgtgagcattaacttacttcctgacacggatttggaaggctatttacaagaaaaacgacaagcacagccgaatcaattattaaaaaatacactttctcgcctactaccgaagcgttttatagagataatgattgaaaataatcaactgcctgatacctcactggctcaacttagcaatgaacgtattacacaaataacgacgttgctacaagcatggcttgttttacctaatggcacagaaggttatcgcactgcagaagtcactctaggtggtgttgatacccgtaatctctcctctaaaacgatggaagcgacaaagataacaggtctctattttattggtgaagtggttgatgtcacaggttggttaggaggatataacttccaatgggcatggagctctgcttatgcctgtgcccaagcattgatctctcgacacatgactaagtagacgcgttatttttataaataaccacacaaagtataggctaacttattggttataatgatttttttaaaaacaaaataaaataactcgttaatcagtgagttaacgaaattggcattatttttttctgttttgattaaaaaaaacactttacaaatgatagtgagaaccattatcattaaatcactttcagatgcaccaccttcagggtcatatgaaagaacgacattgctcacattgcttccagtgttttactttagccagccgggtgctggctttttctttttgttagaatggacaaaatatcaacatccatataataaatatatatatttcaataactttatgctcattatctatgaatagatatgatattaaaaaattttagaaaccagtgaaactggtaaagaaagaggccatatttttatatcttttattcttgatttttctaataacgaaaaactaatttaggctaattacctaatttttagtataaaaatgaatgtgtatacattttatcatattattattatgatatttcttcttatacaacattagtgctcattcattaataaatataaaaaccaataaaaacaagaagataaatatgctaaataaaaatgatagagataagctaattaaaaataataaatataagaatataaagtttaatgtaaaatgtaatattcaagttattttgtttatttcattgatttcattagtttttatcaacaacgaaaacttacctctaaaatataaaattgcacttagcggtgggatgatatcttttatctatatatttagcgcataccattcatttggtagtctatatctagcaaacaaaataacatatgtatttataaaaataaaaataaaaaaactaatcacttacattttcagaaagtaataatctaaacttatttagcgattatttttacttcagagctagttaaaagaaaagataagaagccccctcctgaaagaagtttcaattaatacctaagtaatagtagcctcatactttatatattcacagtatcaattcaatgctcccttattcaaattatttggatcctcagattaaattcctccgcttttttacttagcttaattgcgtaaactgtgttcaacaactttagagaaggaaacacattatgatttatttacgcaaagcaaatgaaagaggccacgctaatcatggttggctagatagctggcataccttctctttcgcaagctattacgatgctaactttatgggattttccgccttacgcgtcattaatgaagatagagtgatgcccggtgagggttttggtacccatcctcataaagatatggaaattttaacctatgtgcttgaaggtaatattgagcataaagatagtatgggtaataaagaaaatgtacccgccggtgaatttcaaataatgagcgcaggtacaggtatcactcattccgagtacaacccaaatagtgataaaggcctgcatttttatcaaatttggatcatgcctgataccaccggtattacaccacgttacgatcaacgtcgttttaataccacagagagtaaacagcttattttgtcaccagatgcacgtgatggctcgttaaaagtgttccaagatatgacgctgtggcgttggaacctaaaaaaaggagaagaggcacaatatcagccagaagcaggaagaaatatttggttgcaagtcgttaaaggaaagatagcaattaatgacattattgcgaccaccagtgatggcatcgccatcgcgaatgaagatattatctatttcgttggtgatgaagacagtgaagtcttgctgtttgacttacctcctgtaacagcatagttgggctaccaacctaaagccactttttctcaaacaatttatttcactttgttttcttgttaactccctgagatgtctttcatctcagggaattttttatcaataaaaccaataactagcgtttagggcccacttttgttaacgcttgccctactggcgtatcagtatatttatcaaagtttttcacaaagcgatcagcaagatcgtccgctttaacatcccattgtgctttatccgcataggtgtctcgaggatctaaaatttcgctattaacgccaggaagcgctgttgggatcgccaaattaaatacaggcagagtttgagtctccgctttatcaatatcaccatttaaaatggcatcaattatcgctcgagtatctttaattgaaatacgtttgcccgtaccattccagcccgtattcactaagtaagcttgtgctccacaagcctgcatacgttttactaacacttgagcatattgtgttggatggagtgataaaaatgctgccccaaaacacgcagagaatgtcggtgttggctctgtcacaccacgctctgtgccagcaagtttcgcagtaaagcctgataagaagtgatattgtgtttgctcgggtgttaaacgagcaaccggaggtagcaccccgaaggcatcggcggttaagaaaatgacttttttagcatgacccgctttcgataccggtttgacaatattatcaatatgatagattggataagatacacgggtattttctgtttttgagccgtcatcaaaatcaacactaccatctgctaataccacgacattttctaataaggcatcacgtttaatggcaccgtaaatatctggctcagcttcttttgatagatggatagttttagcgtaacaacctccttcaaagttgaatacaccatcatcatcccagccatgttcatcatcaccaatcagtttacgcttaggatctgttgataatgtcgttttacctgtccctgacaaaccaaagaaaatggctacatcaccactttcgccaacgtttgccgaacagtgcatagaagcaataccctttaatggcaggaagtagttcatcatagagaacataccttttttcatctctccgccataccaagtaccaccaattaactgaatgcgttcagttaagttgaaagcaacgaaattttcagagtttaatccctgcgctttccaatttggattggtacatttagcaccgttcatcacaataaagtcaggtgtaaaattttctaactcttcttgcgtagggcgaataaacatattcttaacaaaatgcgcctgccaagccacttcggtgataaaacgcacttttaatcgcgtatctgcattagcaccacaaaaggcatcaacgacaaacaaacgtttgcctgatagctgctcagtaactaatgattttaaatcagcccatacttgcggtgaaagtggtttattatcatttttacctttgccctgatcagcccaccacacagtatcacgagtaacatcatcacgaacaatgtatttatctttcggagaacgtccagtaaaaatccccgtatcaacagcaatagcgcctaacgaggttaatgtgcctttctcataacctgttaatcctggcttagtttcttcttcaaataataagtcatagctagggttataaatgacttcactaatgtcatgaataccgtactgctcgagatccttaggggtaagacctttaacgttcatagttttgctcctgataaataggcttttctatgagcattattaaggtgttacaactaattaacagcgattgttatcaatattttgaaaatttatattttttttatgttaataacgagaactaatgcacaaatctacagaaaaattgttgaataaaaaaggacgcaaaatagcgtcctttagggtgatttacgttgctaaatcgaatcagtgcaaattagagctagataatttattgatattattaatatcttcttcagtgaagatataatgagcaccgcaatattcacactccatatcaattttaccctgttcttgtaacagatgagctacatcttctttagataatgttactaatgtatcttcacaacgtttacgagagcacgtgcaatggaacgctatcggctgtggatcatataatgtcacatcttcttcatgatataagcgatgtaaaatctctttagtatcaagtgtaaacagctcttgagccttaatggtgtgcgtaagttgtgttaatagctcaaagtgttctgctgtctcatcagcactatgttctgcactcgcaggtaaggcttgtaataacatacctgcacccgccgcttttccatcttgcagacctgtgcggataaagacacgggtaggtaactgctctgattgattaaagtagttatcaatacaagcttctatcgtttcaccatccaacgctacaataccttggtaacgctcaccttttttaggtgtgatggtaataaccataaagccattgcccatcatctcttttaagctgctaccggctttaacatcatcactaaaacgtgcaacaccgcgcatctgttgttcattattgccgttaataaccactaatcgtactgggccatcaccttgtaattgaacggtaatatcaccatcaaatttcagcgtagctgttaacaaacttgtcgcgaccaataaatcacctaacaggtgttgaactggctcaggataatgatgattttcaagtattgattgataggtttccgttacggtaactaattcaccacgtaccgcgcttttttcaaataaaaagcgtgataaagcgtcttttttagacataatcttctctcattgctggggagcggtttaatccgatcctggtaaatttgtctgtttcaagcgaagtaaggtgcgtctttcctttttatcaggtcgacgttcgggatgaggcatcgttaacgcattcatttttcttgctagagcgattttttctctcttggcaatactctctggtgtttcacaatagagcaattgtgcttgggccgcccctaggcgctgtgcactcaccattaagactgtaactgtccgttcatcattaccttgtcgtaagcgtatttcagccccaacttcaacatttttacttggcttgcctcgcacaccattgtaatggactttacccccttcaatcatagtgcgagcaatggcacgcgttttataaaaacgtgcagcccaaagccatttatctaaacggacagcgctttcttgcgatggttgactcatccctttctctccttaacttcaacttcttcatgaaggcgatagagtaaacacattgccttccacaacaaggaacttactgaggagggcgataaaaacagtgctcgtaatattgactgattttatgcatgcgttgattattttgtcgccggcgccggatgataaaaaataaattcaggatcaaaaatccaatagcaaagaataataataacgtattaccgatataatataacagggtcattgagtcaggcatgctatgcaaaaagatttgtaacgtgccattcgcatcaattaccatccccgttattacacctccagtattaaaaggtgtgtgtaataaaatatcagataatcgctgtaattctcgccattgctctaatggtgtaggttcaaatacagagttggtatttgaagcataatcaacgagctgttttctttcatcactgattaaaagcacaccacccggtggtggactatttaacagtattgcggccttatctatttctcggtagataaaagatgatgtggtggtgtcaacgagcttttccaaggcctcagcactaacagcacgtaataaaacattggttcctgttaatttgccactttctgcacgttgaactaatgatggccaatcattgacattacttaggtttaccaaggccattttaagccgaatacattcattttctctcgggcataaatcttgtgttttcaagataatgccatcaaaattatccaaaagattcatgccagatttagtaatagcttgacctaagcttgggtttacacggttgttagaaacggggtgtagctgctcttcaaccaaatataataatgctgccgctttttcaatcgtactagactcaggcattggcattgggttgctgttgttccaataaatccccgaacaatcaaaaggtgcaaatattgttttattattcttactggaaaggtttggaggcatataacacattccgacacctttggcctgaataatatcccctacatgcaacttggccgtttctaactccgtaaagttagtcactaaatgaggttcactctcttttatccatgaaaaagttaacttcattgataatgataacggttgatagagatacagcatacctataataaataggctacaaacaacaaagataatatttttaatgtaacgcttatacggatagtttttttcttcatcatgcaatgataaataaggcccttgcttgataacatgatgattaggatacatttctaaataggtcaccttatcaatatcattttgaatataaggttcccaatgtggaggataaactaaatcaattccccccaacgaaatattttttacctgcccatgatcaaaattaccaaacagtccccagcgttttaaacgccctttaaaacattgtacttcttgttttcgtgatttgatgatgggtcgataaataagaaacaagcctaaaacaagaaaagtccctcccgcagccattatccaagggagaaagacttgtggcatcattaatgccgttaaccataagattaaccctaagcaaattaacgagccattccaaaaacctgaagaatgatgtaaccgatactcttcgttggtttcttggcgaatatgtaataaatgcgccgcatcaccttcatttttctggatagtggaagtgccatttgacagtatgggttcagaaagttgttttaaacttaacgcagaaaaatgtgatttttcatctttaagaaaatggccattcacaccaatgacaatggggatagaaggagtacaaacgacatcgaggacattttcttgttgcagataaggcaccagtaatggaggaatatggatctctaccgcatcaatgtaatagcgccaatgattgagcccctctgatgatcccgcaaaccgattaacaatattacgcagtgtcgtaacgacttcacctttagtgggtatttcaggaaagttttgtaacgaatacccagaagaaaacttagaggtgccaaaataggacaaatagtcactaattaccccataatcatcttgtgttagtttacggtaagtcggtttggcgagggatggaagatgatatgagccatcaagccgccttcttttaaagaatagaaaggcggccattataaataggctaatcatgaagatagccaatataatgactgataatctcattttttccccatactcatgctggtgttgcttagtaacaataacaaatttgaaatgccacctaacataaggcaattcctattctttagttctatttttttattaaaatacaatgaattatatttgtgttgttgcgttataatttatatatattatcaattttatatccgccaaccatgccattttcagataaaatagcgcatcaataaataataatactcccaaaaaatcaatcaataactgggtttagtagcggagtgtactcaattttcactaaaaagctaaatctaattgttggatttattttatcattaatgtgttaaattcaggttaatctctattcctatcaggggctgttatgaaagaactaaaaaaaccgaatatactcaatattgataacattgcccgttctcggttatttcagatccaatccgttaatctggaatttagcaacggcgaaaaacgtatttatgaacgaatgaaacccgctaaccgggaagcggtaatgatagtccctatcatcaatgatgacctgatccttattcgtgaatatgctgttggcatcgaaaattatgactttggctttcccaaaggggctattgatgcgggtgaaaccccattacaagcggccaatcgtgaattaaaagaagaaattggctacggtgccggctctttaaccgagatagctaaactgtctatggcgccctcctatttttccagcaaaatgaacattgttattgctcaagatctctatcctgaacaattagaaggcgatgagcctgagccgttagttcaaatacgttggcctatcgccaagatgatggacttattagatcatcccgactttaccgaagctcgtaatgtcagtgcactctttttagcacaacgttatttgcaacaagtttgtccaaaataataattggctcgcgatatccagataaaattaaggccaccaaatagggaggccttgatatctatcatctctttttattagaaaatagcgcgttaccacgctttcaccgcatcacctttataaacttcttgcgctttttgcaaaatttcatcactttggaaaaccgcgacgagtttttttaatcgttcgttatctttgtctatggctctggcaacaatcaaattaacataaggagaatcggtattttccataaataaaccatctcgtttggctaataatcccacttgtgaagagaagttattattgatgatggaaaggtaaatattaggatcacttaacgtacgagttagttgtggtgtatcaatttctgcaaatttaagtttcttagggttttcaataatatcaagtgtcgttggtaaataccccaccccatcttttaatttaatcaatccttgagcctgcagtaataataaactacgacctagggtggttgcttcattagaaatagcgacagtagcaccatcaggaagcgcctctatggttttgattttatttgaataagctgcaataggaaaaataaaggttttacctatgatttcaaattgataaccacgctctttgctttgagcttcgtagtaaggtacggtttggaacgcattcacatcaacatcattattacgcaaagcttcattaggtaacacgtagtcattaaaggtgatcaccttgatatctaatccctgcttttcttttgccagcttaacaacttcatcccaaatttgctgatctggccctgtatttattgccacttttaacggtttatcaccttcatctggtgagcaagcggttaaaaccaatgaagtacaggccaaaagcaccactaataataattttctcatcttctctccaataatcgaccatgtcactcttattatttataacttattgttattattaagtttaatgtttttattatgctatcaaggggactacttatactatataacaacacgtatttagacatctagacgtttagatagttatttataacgggaaagagtggagagatcaaaatagatttacacacaaaacatgaaatattttcatgttggaagatgagatgtatctatatctatttattagataacaaaaagcgggaaaaacaatctgttatcccgctttagttattcgttagatcgctatttaatctaactttttgtttattatattaatcaaaatagctcgttagattcgccattatcctcaaagatccgtgtacccacttcactttttgctttttctgttggctgagtgccttcaataaaatactctttcattgatggtccatctcccgccaacttaccggtattgcgatcgatttgaacagcaacaacgccttttggcatcggcatcatttgtaccggaacaccttctaaagcaactttcataaagtcattccaaataggttgtgccgttttggcacccgcttcaccacccgttgcggcagttcgccctaaattgcgactactatcatcaaaaccaatccatgcagtcgccacaatattagcaccatatccagagaaccaagcatctttagagctattggtcgttcctgtcttaccaccgatatcttgacgttttaaatctcgcaatgcacgccatcctgtaccagaccatcccggctcaccaacgagattggttcttaacgcatcatgcattagaaacgccagtggcgtacttatcacatgaggagcatatgggctttctttgactgtttcagcaagaggtgcttgctctaactcaatatcaggcgccgtttctgccggttgcgcttgctgagattgtgcgacgttttccatataatcatcagataatgcaatagagcgcgtagtatcaccataaatcacggggatatcggtacattcaggacaagcgactttcggctcagcagtaaagatcacttcaccatcagcattttcaatacgctgaataaaatatggctcaatgagatacccaccatttgccattaccgcaaaacctcgagccatttgcattggtgtaaatgaaggtgagcctaaagctaatgactctgttctatctatattttgattaggaaaaccaaaacgcaatagataatctgcagcgtaatcaacccccatcgcccgcatagcgcgcaccataactacgtttttagattgacctaaaccttgacgtaaacgaataggccctgcataagtaggtggtgagtttttagggcgccaatcagttccagctcccgcatcccaacgactaataggtaagtcatttagtaatgtcgataatgttaaccctttatctaatgctgccgcatataagaaaggtttgatatttgaaccaacttgacgtaacgattgagatacgcgattaaacttactcaattcaaaatcaaaacctcccaccagcgcaataataccgccattaagtggatctaatgcgacaaaagctgcattaacctcaggaagctgtgctaataaccaatcgttttcactattttgtcgtacccaaatttgctcaccagcatgtacaacagcatcaactttgctcggcgtggccccttgagccgtatcagaaataaatttacgcgcccaacgaaccgcttttaaatcgagtgttattttatcgccattttttaataccacctgagcttctttagcatcagcggataacaccactgcggggattaatgggccataagtctgtataccctttagcttatcgttaatggctttatcatcccaaggagtttgccctgcatgccacagcacctcttgagcaccgcgatagccatggcgcatatcataatcaataacattattacgtagcgcttgttcagcggctaattgatctttgcggataactgtagtgtaaattttataaccatccgtataggcattttcgccatagcgctgatacatctccattctgaccatttcagtcaaataaggcgctgaaaaatcaatttgtggggcgtgatatttagccacaataggctcagctttagcactgtcatactcttcgcgggtaatatagttctcttccaacatgcgttgtaacactaaattacggcgttttaaggcacgatcatacgaataaagtgggtttagtgtcgaaggggctttaggtaaacctgcaataacagccatctcacttaagctaagatcatgcacacttttaccaaagtaaacatatgcagcagcacccacaccataagcgcgatttcctagataaattttattgagataaagtgccaagatctcatctttagtaagctctttctcaatacggatagccaaaaaggcttctttgattttacgcattaatttcttctcaggtgttaagaagaaattacgcgctaattgttgcgtgatggtactggcaccttgcgatgcttgccccgatgttaacgcaacaacaacagcacgagagatgccaatagggtcaataccatgatgttcacgaaaacgcgtatcttcagtggcaataaaggcattaattaattgcggaggcatctcctgcaaggtaagaggcaaacgacgtttttcgccatattgcgccattaactctccgtctgcgctaaagacctgcataggagtttgtaaacgaacatcttttaatgtcgcgacatcgggtagttgaggctcgacatatttatacatgccatatatcgaggctgctcccaaaattatgcaagcaaaaacgaagatgaaaaaatattttaagaacttcaccttaaatttcccatgtaatgtgaattgggcagtttataaacaaacagtgcgtagtataaaggtaacgcctcttggaaaataggctattacacattcaatagatatggatatcatttatgaaaacagataattatcagattggtattgaaattaatatcaatcatatcaatgccgttttagtatttcagcagaataagcaatggaagatcaatgcattttggcaattccctttacctcttaatgataatatagatgatataaatttaagaactatcttaaaacgatggcaacaatctctaccgccaatcaaccgtgttgcactggcattacccgatacagtggcaagttatcataccattgctttatctaacctgatttccctgacaccagcagcctattatcgattagcacaactccgagccacatctcatcaacaagtcaccaaacaagcggtacaattcgattatcggcaacataaccaacatctcgccatccatttacataacaagacactgatagagacttatattgccttattcgccaaaataaacttaaccatcactgcgattgatattccagcttgtgcgttgcgttatgttgccacacatctcaacatatcgcctcacagcatattaattttttgtcaaaataatcaaatgctttgggtttgtgcagataaagagatgccccattacggtactctttcttatcaagaccaccaagagcaagaaaaacaattacagcaattactcatcaagcatcattggccacaggagcaatgttatttctcaggtgacaatgcagaatactttcgccaacaaatgcctatttggccaacccaaaaagagcggctatttatgtctataccgcccaaaaagacgctacctctaattgccattggtttagctttgcgtccttgggagacagcatgtatcaaataaattttcttccttggcgtcaagccttatatcgacatcaagcacaacggtggctttattggagcatgatactcgttgttattacattcagtgcttgcggttactacgcttattatttagtacaacaagtaaaaacactctcacttttacaatcacaatatcaaaaacgtgagtactcactacaaaagcaatatcacaatgaccaacatgaacagaaagtcacccgcttatatcaacagcgttattggcattattatcaacattggcttcactatttaagttacctcgctttctttcaagcactagaaacactgctccctacggaaggttatatcgcgcagttttctgaaaatgatgcaacattttcgcttcaggtgcggcttccttgtgagcaggcacttacttttatatctaaagttaaccaacaccccaacctaacatcattaacactctcctcttttcaacagagcaaacaagatccccgttacagcgaaataaggttttctggtaagtggcagagttggcaatatcaagtatctcaacataggcatagcgaacaagatgtcgataacaatgaaaataaagactaattgggtaatttatttcgtccttttacctttttggcaaaaggcactcttaagtttagccccttctataatagtgagtttgttatgttatttattcagcttttcgggctatcagcaggacataaccgcgcaacaacagcttattagccaacaccaaacgcagatacaacaactgcagtcgatattgcattcgtctcctgctatagccttattaaaagcgttacaacatgactataaacttccaccacaaacaggctcagcctatcagcgtttacaacagataatcgataaccatcacttgatacctcatagttggcaacatagtgtcgataatagttttaagctacgtttttcactctcttactcacaattactaacgttattagcgcatctacatcaagcaggttgcgctctttctgcactgctcatttcgcctatcccccctgatttactctcagttgaattgaatttagtcgacataacgacaccaaatgttctagcgcctttgaagtcagagtgaaatattatgaaaagcgtctttttttatttgctgttactactatctattttgtgctttgctggttttgctcaatccagagatcctttttatccagaacaacctattgatagtaataacactcaccatttcattgataaaacagataatagtgaaactcttcaacaccaaaacagcacattacaccatcgtatctacccactacagtatgctgatgtaaccaccgtggcacagcagttaacgaactatggaatttcattactcagtgatcatggacgaatagccatagataaagattcaaatagcttatccattattgatacagaaaaagcacatactgaaatttctgattggttaaaaattaaagaaacaccacagcaacaggtgcatattaccgcacatatcatcagtagcagtcaggatgcgttaaatgagttaggaacgcagtggggattactcaatatgaaatcggcaaatttagaaggtacatcaaacaatactacaacaccccataacatagcatcagcaccgctcacagcaccttctcttgccgcattggcactgcatcaaaaaacaaaaaaccccttacattacatagcctttaatatcgccagaattaatagtcgccttttagaattagaactaagcgccttagaacaagagaaacaactcgccatcattgccagtcctcgattaacggctgcacatgaaaaaacggcatctatcaagcaaggaaccgaaattccctatgtcagcagagataacgacaccatccgagttgaatttaaagaggctgttttggggatggaggtaacgccgatcattcaaagaagcaataaaattagattgctattaaaaattagtcaaaacacaccaggtattgccttagtacaaggaggtagtgaacacctttcaatagataaacaagaaataatgacagaagttactattcatgatggtgagactctgatgttaggaggaatatttcaacaaaagcagcaacagcatgcagcaaaaattccttttttatcttcactgccattactagggatactttttagccataagcgtgaccaacatagtcgtcatgaattggttatttttattacacccaaattaatctaattttcttcgtgtgatttatttttttattataatacaaacaattaccttatttctgccaagataaaactgtaagttattcattgttttttcttataatctctatttatagatttgacgctgaggacgatttagcttacaagggttagctaattgagtgggcctgaaacatcacaacgataatacggatacattttatgcacttcctctttcttggaggtagggctttttatatgtaatattgatcaactgatgacagaaaagacaaagtgatcagatgcggttttccggctaaattgtgttagaatctccgcattgccaacaaagataatataatttttataggtcatatcttgttatgtactgtaggcaaagggatttttatcctgtgttgtcgcttgcgacaacacgtggttatttaatagcgttctactgaaaaaactcagttttaatatgagagtagatacacacgttatcaggcgtgaatgaaataaacactcataaatttcagtttaggtcccgtcgctgaatgaatttggcggggcgggttatcattaacgaatatcttagtaataccaaaaacatggcagagaaacgtaatatctttctggttgggcctatgggtgccggcaaaagcactattggtcgtcagttagctcaacaacttagtatggaattttatgattccgatcaggaaattgagcgacgtacaggtgcagatgtaggttgggtatttgatgtagaaggcgaagaaggcttccgtcaacgtgaagaaaaaataatcaacgaacttactgaaaagcaaggcattgtactggcaacaggtggtggttcggtgaaatcaagagaaacccgtaaccgactatcagcacgcggtgttgttgtttatttagaaaccaacattgaaaaacaacttgctcgtactcagcgagataaaaaacgtcctttattgcaaggtgttgaacccgtacgtgatgtactggaaaccctcgcagaagaacgtaatcctctttacgaagagattgctgatatcaccattcatactgatgatcagagtgcaaaaatcgttgcaaatcaaattattgaattattagagaaaaactaataaattctttagatgagatgaaagtaaagactacttgaagaaggccgttgctatggaaaaaatcactgtgactttaggtgaaagaagctatcccattaccattgcttctggcctttttcaccagcctgaaacctttttacctttaaaaaaagggcaacaagtgatgattgtcacaaatgtgacacttgcgccgctctatctagacaaggtaacaaacaccttagaacaacaaggtgttttggttgatagcgtgattttacctgatggggaacagtataaatccctaacggtaatgaatgatgtctttactgcattattagaaaaaaatcacaatcgagatacaacactgctcgcactagggggtggtgttattggtgacttaacaggctttgcggctgcaagttatcaacgtggtgtacgttttattcaagttcctaccacgttattatcacaggtcgattcttctgtcggtggaaaaacagcagttaaccatccactgggtaagaatatgattggtgctttctatcaaccggcatctgttgttatcgatctcgattgtcttgcaacgcttcctcctcgtgagttgtcatcaggcttagcggaggtgattaaatatggcattattttagataaagacttctttatctggcttgaaaacaatattgataaactgatagcgcttgaacctaaagccatggcttactgtattcgccgttgctgtgaacttaaggcacaagtagtcgcagcagacgaaaaagagacgagtggtctacgagctttacttaatttaggtcatacttatggtcacgcaattgaagcacatatgggatatggtgtgtggctacatggtgaagctgtcgctgcgggtatggttatggcggctaaaaccgcacaagatttgggtcaatttactcaagcagaaactcagcgagtgatccaattacttaaaaaagcaaatcttcccgtcaatggccctgatgagatgcaacctgaagactatttacctcatatgatgcgagataaaaaagtttccgcgggtaaattgcaccttgtattaccaaaaggtatcggtcaatcagaactacgtgcggatatctctcgcgaacaagtgtataaagcgataacatcatgcattaatgcaaattaagcataccatcacctaacgagagataaactggaaagtctatttaaggaaaattctggttaataatctcaaatgtgacgtttcagaaaaagcgtttcatccttatactagaggtaatggctaactttcgctttttgacgctctgacggagggcataatggacgagttcaaacctgaaaatgaaattaagagtggcgataactcactcaaacctgatacttcggatagacccgaacgtcgcactaatcgacctcgtaataacccattaaaaaatgctcgtttctctgtatcccgtcaacagatgatgataggtgttggggtactggttctcattcttttaattattgcgataagctctgcgctgaaatcaccagacagtgataaagaaacaacggcctcaacaacaggaacagaaaagaatattgaactgtctcagccttcagtaacatcaacaaacaatcaaacatccacacctcaggagctgacgggtcaacaaatacagcagcctacaacgcagccatctcaaaatctccccccaatgattgactctcaaggtcaacgtgttgagatcccaggagatattgttgattcactcaatcaacaacaagcaggtgttaaccaagctgttaatcaacaacagcaaaatacacaaaaccaaccgacaacgccacaaactccggtgaccaaaccacaaccggcaccaacacaaaaaccagaggtcaaacctacaccaaccaagccggtaacacctcctgcaaccacacagactaagcctgtggcaaaaccaaccacaaaacccgttgcatcaggagccttatcagcaaataacctagcagccattcctgcaacaaattatactttgcagctaagtggtgcgagtcgccaagatacgttagaagctttcgctaaaaaaaatcttaatggaaactacgctatttataaaacccagcgtaatggtaatccttggtatgtactcatctatggtaactatcgtaatataagcgaagcaaaacaggccgtggcttcattaccggcggctgtgcaagctaaaaaaccttgggttagacctatgaaacatgttcatcaggatctaaaaaaataagttaacgatgttcaccgctgatatgctgtctgaaacagagtacaatcggcgactctgaaacgattgagaaatttggacggcatgaaaaaaaaacgcgcattcctaaaatgggctggtggtaaataccctttggtagatgacattaagcgtcatctacctcaaggtaactgtttaattgaaccttttatgggtgctggctctgtatttttaaatacagaatatgattcatatattcttgccgatataaatagcgatctcatccatctctataatacggtaaaactgtatcctgaaaaatttatgaaggatgctcaactattattcactccccagatgaataatgcagaagagttttatcaactacgacaagactttaatcaatcaacagatccataccaacgcagtgtgctttttctctacttaaaccgtcattgctacaatggattatgccgttacaactccaaaggtgaatataatgttccttttggtcgctacaaaaaaccttattttccagaagacgaattgatttggttttcagaaaaagcgcaaaaagccttatttgtctgccaaagctattcatcaaccatgacaaatgccaccaaaggttctgttgtatactgtgatccaccttatgcaccgttatcaccgacggcaaattttacctcataccatacaaatagctttagtttccaagaacaacagcatctagctcaacttgcctcaatgttggcttacgagagacagatacccgtgttaatatcaaatcatgaaactgcgttaacaaaagagtggtatgtagacgcgaaagagctacatagtgtgaaagtcagaagaacaattagtagcaacacactaggtcgtagcaaagtgaacgaattactagccttatataaataatcgttaacacttcccgacaatgggagtgttgtcaggagaacgcgatgaaagattttctgattgccccttctattttatctgcagatttcgcccgccttggtgaagatacggagaaagtgctcgctgcaggtgctgatgtggttcattttgatgtaatggataatcactatgtccctaacttaacgttcggtgcaccaatttgtaaagcgctacgcaactacgggatcacagcacctattgatgtccacttaatggtaaaaccggttgatcgtattattcctgattttgcacaagcaggagcaacctatatttcatttcatgccgaagccagtgagcatgttgatcgcactattcaattaatcaaagattgtggctgtaaagcaggtttagtccttaatcctgccacgcctctcaattatctcgattatgtaatggataaattagatcttattcttctgatgtcagtaaaccctggcttcggtggtcaatcatttataccaaagacactcgataaattacgtcaagttcgcaagatgattgatgatggtggctatgacattcgtttagaaattgatggcggtgtcaaagttgataatattgccgaaattgctcaagcaggtgcggatatgtttgttgctggctctgctattttcaatcagccagattataaacaggttatcgacaatatgcgccgagaattagataaggtatcgaaatgacagaaaaaaaactcaaaggtattcgtgctatcgcttttgatcttgatggcacactaactgacagcgctgttgggctaacagaagccacaaactatgcactaaaagcaaaaggcttcccaacagtggataaacaccatgtcaccatttgggttggtaatggtgttgatatgctattaaagcgcgccctgcaccattgtggtgttaaagatgtcaccgatactttattaaaagaggtacgtgatctctttgatgagtgctatgcaaactctgtcaaaacaggaagcaatctatttccacacgttaaagagacactagaaaaacttgcttcgtattctctctctttaggcatagtgacgaataaacctactccttttatccaaccactgttaaagcaattaggtatagacaacgacttctcattggtgcttggtggtgatgatgtaaaacaaaaaaaaccccatccagcgccattatatttaacaatgggcacgtttggtgttaaaaaagaagagcttctttttgtcggagattcccgtaacgatattatcgccgctcaagcagcacagtgcccttgtgtggggttaacttatggttataactacggtgaacccattgcagatagcaaacccgattttatactcgacgattttgctgatttgctctctatccttgatattacgtcaatgacaacagtggaacagaactaacatgacgacttcagtagaaaaaaaggctcaaaagcctattgtattcagtggtgcacaaccttctggtgagttaactatcgggaactatatgggagcactacgtcagtgggtacaaatgcaagatgactacgattgcatttactgtatcgttgaccaacatgccatcactgtacgccaagatcctaccgaactgcgaaaaagaaccttagatacactggctctttatctcgcttgtggcattgatcctgaaaaaagcacaatttttgtacaatctcatgttccacaacatgcacaattaggctgggcgctaaactgctacacctactttggtgaattaagccgtatgacccaatttaaagataaatcagctcgtcatgctgaaaatatcaatgcaggattatttgattatccggtcttaatggcagccgatatcctcctttatcaaaccaaccaagtacccgttggtattgaccaaaaacaacatcttgaattaagccgtgatatcgcccaacgctttaatgccatctatggggacattttcaccgtacccgatccttttattccaaaaggtggcgcacgcgtgatggcattacaagatcccgctaagaaaatgtctaaatctgatgataaccgcaataatgttatcgctttacttgaagatcccaaagcggcggcgaaaaaaataaaacgtgctgttacagactcagaagagccacctcgcgttgcgtatgatctagaaaacaaagctggtgtttctaacttattagatattttagcgggtgtaacaggtaaaactatccctgaactcgaagctgaatttgaaggcaaaatgtacggtcatctaaaaggcgcggttgctgaggctgtatcagatatgctgacaaatattcaagaacgctttaacaccttccgtaatgatgaagcactattaaataaaatcatgaaagaaggtgccgataaggcaaaagcgcgcgctcaaacaaccttagataaggtttatgaggctattgggtttattgctcacccataatcgttattacaggccagttgacatcctccacgccctaaaggacgtggagccctactgcgttcagactgatgtctgaatcacctcggcgggttcctgcttcgacgggcggtctgactgcaccctccctccactggcaagcacggcatgtcctgccgctaaaatgttacgtgccccgttgatatcagcattcgctgtatatccacattcaaggcactcgaattgactttgtgacgggcggttttcctttgctgtatgaccacagcaagcgcacttctgactggtgtaggctggtggtattgccagtacctgacctcctcgccagagctgcttgtactcaagctgacggcgcatttcataccagccctgctccagtattgagcggtttaaaccagatttagcttttacgttccgtccaggccgttctgtcgtaccttttgccgatttagacatgttactgacctttaagtcctcaatgacaatcattgcgtggtttttgctgatttcgctggtgactttgtgaaggtagtctttccttatattggcaatatgagaatgcagacgttgaattttgcgcttttgtttttgccagttggcactgaatttgattttacggcttaatttccgttgaagccttgccagctttcgctggttgactttaaaactgctgacgggcgggtataccgtaccgtctgaaagcgtggcaagttttgtaacccctgcatcaagcccgactattgaggttgattcatgttgtggttctgtcgcttcatgctcagtctgaatgctgacgtaccatttaccgcatgactgactgaccgtgacgtttctcacttctccgacgacttcacgactgttgcggtagcgcatccatcccaactttggcaatgatatacgactattggattgatcgagcttcacgccctgcgggtagcgaaaagcatcatttttaccgcgtttcttgaatcgaggaaaagcggtacgcttctggaaaaaattcttgtaagcccgttccaaatctttaagtgactgttgtaacggttgtgatggggcttccttcaaccattgtgtctctgtgtcagatttccactcaatgagccatgaagccatttttgtatagggaatgtatttattccctgcttcgtgctcctcattctgacgtgctaatgcccgattgaaaacaaaacgacaagcccctgcaaagcgtctcatctcacgctcttgctgaccattaggtcttaactggaatttaaaggcttgtagacgtttcatattatctattatactttggtctatgaaaaatgaaactaatattcgccgtggcagacattgtgtattcctgatgcacgtccatttggtctttgtcacaaaataccggcgaaaaatatttgatcaggatgcaattgaaaaattgcgaggctactttgccagtgtttgtgctgattttgatgttgaactggttgaaatggatggggaacgggatcacgttcatttactgattaattacccgccaaaactggcgatatctaatctggttaacagccttaaaggggtatcgagtcgattacttcgacgtgatcgtcctgatattgcacaacgtgattactacaagggggttctttggtcgccgagttatttcgcggggagttgtggtggcgcaccaatatccattatccgccagtacattgagcaacaggaaacaccgagttagttaaaaaaccacaccttatatccccgacctgaaggacggggttttacggtgctttggataactgctggcctattttctgactatttcttaaatagccttctatcaaaactttcaatagtttgtttttgcaatcttaactgcatggttttacaccaactagcggatagtcctgccgctgttaataagcgacgatacgactcctcatcaaatggcatatgaaaagcaatagcaattgcttctttgaccgagatatcgctatttcttgagcgtagaaccaaaggatgatgacagcctacttcgccgggacttatcacgcgatataaccagccacaaaaaccgctatcttgcatcagttgtgaaaaatcgctgatatcagtcaccgtgtttaacttataacaaggtgaacgaggctgggtcacttgaattaaagcgtcaccccattgatatatatcaccaataaaaacattctcttctgtcagaccggtagtcgaaatattttcaccaaacgcaggagcattaaataagtcagccagttgaggaaattgctcagaccagtaatgataatgttcttgaggataatggcacaaagcgcgatcaggcccaccatgaaaccctttttctgcttgctcatcacctgctaagcccagtgatgttagtttaatatgcccatccaccagccttttggtgatcgcactggtaaatccatttgcagtcgtcgtgatattgccaataaaaacactggggaaatagcgcataactcattgcctcaatgaaaaaaagtccttttataataaagagagcaggctaaataaacaatgccgacaataattgtcggcattgataaatagagagaaaagagaatgatagcgatattatgctttgctctgatagcgtttttgcgcctcatcccagttaactacagaccagaatgctttgatataatcaggacgacggttttgatatttcaagtaatacgcatgttcccatacatctaagccaataattggatagccagatgcacctgctaactcttcacccattaatgggctatcttggtttgcggtagaaacaacagctaattttccatcatcttttaatactaaccatgcccaacctgaaccaaaacggctagcagcggctttttcaaacaactctttaaatgcatcaacactaccaaaatcacgttcaatggcatcttttaatgaaccatgtaattgagtgcctagctttaatcctttccagaagaaagtatggttagaatgaccacccgcattgttacgtacaaaggtacgttgatcagcaggtactttatgtaaatttttaacgagttcatcaatttctaaacccgctaattcaggcagtttttctaacgcagtattggtattgttcacataagtttgatgatgcttagtatggtgaatttccattgtgcgctcatcaaaatgaggttctagcgcatcataagcataagggagtgcaggtaatgtatagctcatattaatctccagtgctgttttatattcgatcacgccatgtgatttatctctttattatagtgaaaaaaatgttaatgaaaatcattatcatatccatattatttttgtggtttttttatccaacccagtgacatcaattttcacagtattttattttaaataaaaagcttattattggtttaatatttcataaaatacccaaaaggtagataaattatacataacaacctttagcactaattgatcacgccatgaaaagcatttccattatttcgtgatcttatgcgcaaaaaagaaacaatgtctctttaccctcttttgttaacgactttttgacatagtattaacaacagtaaggagaacaattatgacaaaaataaaccaacatcacattcctgcaaacattgcagagcacgccctgattaataaagagcaataccaaaaagattatgcattatccatcgaaaaccctgaggccttttgggcagataaagggaaaattgttgattggataaccccctatactattgtgaaaaatacctcctttgatccaggccatgtccgtattcgctggtttgaagatgggcaacttaacattagccaaaactgtcttgatcgccatttagaaaaacgcgcggatcaagttgctattatttgggaaggtgattcccctaatgaatcgaaaagcattacctatcgccaacttcatcaagatgtttgtcaattcgccaatgtattaaaaaaactgggtatcaaaaaaggcgatgtggtggctatttatatgccaatggttcctgaagcggctgttgcgatgttggcttgtactcgtattggggctattcattctgttatttttggtggtttctcaccagaagcagtggcagggcgcattattgactctaaagcaaaattagtgatcactgcagatgaaggcttacgtgctggtagagcaatccccttaaagaaaaatgttgatgatgccctcactcatgtggatatcccgcctattgaacatgttgtggtcttacgtcgaacagggcaaacagaacaatggattgaaggacgcgatttatggtgggatgaaattgttcaaggcgtcagtacagaatgtgatgtggaagtcatgaacgcagaagatccactctttattctctacacatcaggctctacggggaaacccaaaggcgtattgcacaccactggcggttatcttgtttatgcctcaatgacctttaaatacacctttgactatcatgatggtgagatttattggtgtacagcggatgtcggttgggtaactggccatagctacttgttatatggcccgctatcaaatggtgccacaacagtgatgtttgagggcgtccccaattacccctccgtcaatcgtatggcccagattgttgataaacaccaagttaatattctctataccgcacctactgcgatccgcgcattaatggcggaaggagacaaagccattgaaggtacacaacgaacctctttacgcattttaggctcagtaggagagcctattaacccagaagcttgggaatggttttatcaaaaaatgggacgtagccaatgccctattgttgatacatggtggcaaacagaaacaggaggcttcatgataaccccattgccaggagcaatggatctaaaaccaggctcagcgactcgtccattctttggtgtacaacctgcgattgttgacaatatgggggaaatacaagacggtgcttgtgaaggtaatttggtgatcgtagattcatggccgggccaagcaagaacattatttggcgatcatgaccgttttgaacagacttacttttcaacctttaaaggcatgtacttttcaggtgatggtgcccgccgtgatgaggacggtgattattggataacaggccgtgttgatgatgttttaaatatctctggtcaccgtttaggtactgctgaaattgaatcagcacttgtcgcccatcctaaaattgcagaagcggctgttgttggtattccccataatataaaaggacaagctatttatgcttatgtcacgctaaatcatggtgaagagcctacggcagagctttatacagaagtgcgcaattgggtacgtaaagagataggcccaatagcaacacctgatatccttcattggacagatgccttacctaaaacacgctctgggaaaattatgcgtcgtatcttgcgtaaaattgcctctggcgacacaactaaccttggagatacctcaacactcgccgatccaggcgttgtagaaaaactgttagaagaaaaacagtctctatcactgaccatttaaagtgctagtgctcaaataatacagcagtcaataaaaccagaatactactatgcaaaggcattttatgcctttgcagggctctcttaccacaaattcatgacatgcggggataaacacctctaaatcatgtaataaaccaaataattattttgaggagaactctgatgaatcccaatatttatcaagagatagaaaataaccctcgctttaaagaactggttaaaaaacgtagtcgtttctcatggggactttcgattattacacttgttatgtatgtctcatttatattgctgattgctttttatccacaatggttaggtacaccgctctatgaaggcagttacattacacgaggtattcctatcggtattggcttaattatcgcctcttttctactaacagggatttacgttattagagcaaatacagagtttgacaaattaacggcagaaattcttggtgaggtagaaaaatgaaaaataaacactacgccatatcactattaacgttattatcccccaatgtattagccgcagcgataaccgaagggggtgaaaaacagccaattaacttccaagccattatcatgtttctgatctttgttggcttaacactgtatattacttactgggcctctaaacgaacacgatcacggtctgattattacactgcgggtggcaaaattaccggatttcaaaatggtatggctatcgctggtgattttatgtctgccgcctcctttttaggaatttcagcgttagtatacacttctggctatgatggacttatctactctattggctttttaatcggctggccaatcattctatttattatcgctgaacgtttgcgtaatttaggacgctatacttttgctgatgttgtctcttaccgtttaagtccaaagcccattagaacactttctgcaataggttcattagttgttgttgccctctatcttattgctcaaatggtaggggcaggtaaattaatcgagctactttttggcttaaactaccatattgcggtgatcttagtcggtattttaatggttctttatgtcctttttggcggcatgttagccaccacttgggtacaaataatcaaagccattttattactcgccggtgcaacttttatggcggtcatggtaatgaaagcggcagactttaacttcaatactttgtttaaagaagctgttaacgtccatcaaaaaggcttttctatcatgagtccaggaggattagtttctgatcctatctctgcattatccttaggtcttgccttaatgtttggtaccgcaggacttccccacattatcatgcgcttttttaccgttagcgatgcaaaagaggctcgtaaaagtgttttctatgcgacaggttttatcggttatttctatattcttacttttattattggtttcggggctatcttactcgttagccctaatcctctgttcaaagatgccgctggtgctttaattggtggcaccaatatggccgctgttcatttagcggatgctgttggtggtaatttcttccttggttttatttctgcagtcgcttttgccactattttagccgttgttgcaggattaactttagcaggtgcatctgccgtttctcatgatttatacgccaatgtaattaaaaatggccaagcagatgagcgacaagagctaaaagtttcgaaaataacggttgttattctcggcattgtcgccattggtttaggtattttatttgagaaacagaatattgcctttatggtcggtttagctttctctatcgctgcaagttgtaatttccctattatcttactctctatgtattggaagggattaacaacacgtggggctgtaattggtggctggtctggcttaattgttgccgttaccttaatgatcttaggtcccacgatctgggtgagtattcttggtcatgatacacctatttatccttacgagtaccctgctcttttctctatgatcattgcctttatcgtttcatggttattctccattaccgataattcttctctggcaactcaagagcgtatgaaatttgaagctcagtttattcgctcacaaataggtattggtgcagagcaaggtaaacctcattaaacatctgtaaaatagttttttattcttaaagtgccaacaatgttggcacttttttttactctttacttaattaaattaatatcggtttaaaaatacatatctatacgatattttaaattactattgactaatgtggtttaattttaagtctattggaaaatttcaagcaagatcaattaattaaaattattataacaataattaaaagtgtaaatataactataagtaacagtataataagtcaataaaagataagataagtactgaaatatcaatttcagactcgttttagctaaacaagacttgtattatgaaatgctaaatggttaactttttattctatatggaaaaaggtgataatgataaaagcatgtctcaagtaataaacttttctcttttatttattttatctatagtacctgcactattagcgggttcaaccctgcatattgaacaaaagttctctatggtgattatcggttggctcctgatgttgctctgcgcaggtatctatcggtttactataggaaaagtgattacttttattgttgcagctttatggtctttaaacctctccatctcactgtttttttatcgtgaacatgatattcccttttcatcatcaatagcagaaactttcattaatactaatggaagtgaaactgttggtatgctctcttataataaatattatgtactcttttatattgttatatttaccagttttttctatttaatacatattagcgcccgttatttaaataacaaaactaataaaagatgtttaattgctatttttatattaataattcttatttctctatacaaaaacttagcaataagatcagagagtaaaacccaattacttgctgagtattatctacttaatacccctttttacaatgcagcagctttagtgcggactttccacgaaaatagacaaatcaaaaagatcacatcagaaaaagttaattttaactatgataaagtggatcaaaaaacagaaatttatattcttttgattggtgaatcagtacgacgtgatcatttaggaatttatgggtatccgtacgatactacccctaatttagagaaagaaaaaaataatattttattatttaagcaagcttattctcctgcgcctgtgaccatattatcagtacccatatccctttctaatatcaacctaacagagttatatgataagaaacactacgctgataatatcatttctcttgccaatcatgctggcttcaaaacatattggttaagtaaccaaggtaaaggaaatccaaaaacgagtgtgatttctgttattgccaatatggcccaacataaaaaatggaatgaatttattggctatgatgaagaattattgccatttttagataatgcgcttaatgataactcatcaaataaaaagctcattgtcctacatacttatggtagtcatgagccagcatgtaatcgttttcctagcacttaccttaaaaccttttcccaacaagaagatgataactgctacgatagctctatcgcttatactgacaaacttatcagccaaattattgaaaaaatacaagataaacccgcatctatactctatttttcagatcacgcattacaacgattagataaaaatagagaagtacgttatcaccatggcgtgaacagtcctcgccaagaagcttataatataccgctctttatttggtatagcgcatctgcaacgcgaccaaatatcaatgaagaaaatttgaataaacctttttctaccgcagataattattggctattaagccaatggctaggtattgaacataactcagcgaaaaaatgttactcacctttaagcgaatgctatcaaacaaaaacgtcaatgatggtcatcgatggtaataagaagttattaaactacgcactattagaatcagaagagcaagcgcctcattgacatcctccacgccctaaaggacgtggagccctactgcgttcagactgatgtctgaatcacctcggcgggttcctgcttcgacgggcggcctgactgcaccctccctccacaggcaagcacggcatgtcctgccgctaaaatgttacgtgccgcattgatatcagcattcgctgtatatccacattcaaggcactcgaattgactttgtgactggcggttttcctttgctgtatgtccacagcaagcgcacttctgactggtgtaggcaggggggtattgccagtacctgaccacctcgccatagctgcttgtactcaagctgacggcgcatttcataccagccctgctccagtattgagcggtttaaaccagaacgactgttgcggtagcgcatccatcccaactttggcaatgatatacgactattggattgatcgagcttcacgccctgcgggtagcgaaaagcgtcatttttaccgcgtttcttgaatcgaggaaaagcggtacgcttctggaaaaaattcttgtaagcccgttccaaatctttaagtgattgttgtaacggttgtgatggggcttccttcaaccattgtgtctctgtgtcagatttccactcaatgagccatgaagccatttttgtatagggaatgtatttattccctgcttcgtgctcctcattctgacgtgctaatgcccgattgaaaacaaaacgacaagcccctgcaaagcgtctcatctcacgctcttgctgaccattgggtcttaactggaatttaaaagcttgtagacgtttcatattatctattatttcatggtccatgaaaaatgaaactaatattcgccgtggcagacattgtgtattcctgatgcacgtccatttggtctttgtcacaaaatacaggcgaaaaatatttgatcaggaagcaattgaaaaatggcgaggctactttgccagtgtttgtgctgattttgatgttgaactggttgaaatggatggggaacgggatcacgttcatttactgattaattacccgccaaaactggcgatatctaatctggttaacagccttaaaggggtatcgagtcgattacttcgacgtgatcgccctgatattgcccaacgtgattactacaagggggttctttggtcgccgagttatttcgcggggagttgtggtggcgcaccaatatccattatccaccagtacattgagcaacaggaaacacctagttagttaaaaaaccgcgccttatatcccctatccccgacctgaaggacggggttttacggtgctttggataaagaggcgcgtgacttaatttaacaatcttcaataatcacataaatcgcatttaaagagccatgaacaccaacaactttaattaattcaatatctgatgtgcaactaggaccactaataatattaatacaagaaggcattcttatattttttaatgccatttgatgtaatctttctgctaactgagcaactcgaggtaaaatcgtactgcgttttagtacaaaaatcgtggtttcagggatcaatccaacacttcttcctttgtcagccccagaaaataaaacaacaccgccagattctgcaagtccatattcagcaaatacaattccgacttttgcctcttttacccgttcaatattttttttaccctcagtatgatcccaaatattggcatgacagtgttctgataaataatcaatcaccccactttcctgtaatcgtggatcacccgttaatatcactggtaaaccatactgttcacaaagagtctctaaatgcttaggtaaagatgacaatgttgtcgtttcataagtacttcctgctaactgagctgtattgagaaaatattgataaagttcatcatcagaaagctccgttaatcgttgttctggatataaatttactggttcaggtaaagcttcaggttgcgtttttaacgacctacctaattgagaagcaagatttgataaaaagcgttctttattgttatccatctcttatttctcctctttttggtgttttttaaaccaactacgaaaactttcaccatcaccttcaggtaaatttctcgcttctgtccatgcttttattgcaccgatatttaatggcgctttaccttctttaataaaccattttgtagcatgagcccccatattcatcccaactttccataacataggatggcggttcacataattaaatacccgagtaatattacgttcagttgtcggtgttataccttgctctaccataacttcacgatgtttctttataagatttgataaaggtatttttactgggcaaacgctatcacaagcagtacataatgagcagacataaggcaggtttttaaagtctttatatccaccaagtagtggcgttaagacggcaccaacagggcctggatagatagaatcatatccttgaccgccaatatggcgataagcagggcaagtattcatacaagcaccacaacggatacaacgtaaaatatctttaaattcagaaccaatgatcttcgagcggccattgtctacaataacaagatggaaatcttctgggccatcaacgttgtcattctctttagggccagtaagccatgtattatagcccgttaaacgtaaccctactgcactacgggccaacatggtaattaagatatctacctctttaaaagtaggtgcaatacgttccatccccatcaccgcaatatgcgttttgggtaatgttgtacttaatcgtgcattaccttcattagtgactaaacaaacagaacctgtttctgctaccgcaaaattacaccccgtaataccgatatcggcagtaaaaaaatcgtctctaatgttctggcgaacaaaacgcgtcatttcttctggtgtatctgagccgttataacccagtttgtcatgaaatatttgacgtatctgagctctatttttatgaatagcagggaccactacatgagatggggcatcttttgcttgttgaagaataaactcggctaaatcggtttcaataacattaatacctgcattttctaatacagggtttaagccaatttcttccgtcaccattgatttggctttgactatttttttggcttttttctcttttgcaatattgagaatatattgagaggcttcttctttcgtttgagcaaagaaaacatgcccaccatgttgttctattttttcagataattgatataaataggcatctaaattagcaagtacatgatcacgaatttgtgccgctctatcccgccaatcctcccagtgtcctaattcatcaaccattttttgacgattacggccaatagtttcttgcgcattagcaacggctttttgcataatttgatcgtgaacttgacgatcaattagcgttttaaaaggaagagagcttgtttttaatgacataattcctcctcattgctcatcaatacttgcgcaatatgcatcactttaactggacgaccttctctctctaaacgaccacctatatttaataagcaactgacatccgcaccaattaaatagtcaggatgagcatccataatgtggtgaactttttctttgaccatttcacctgaaatttcagccatttttaccgaaaacgtccccccaaaaccacaacaggtttccatattgtcaaaaggtaataattctagcccttttacatgacgtaataatgtgagtggctcttctttcactcccattttacgaaataagctacaagacgggtgataaacagcttttcctttaagacttgcacctacatcaacaatatttaattgattaacgataaaggaggtgagatcaaacatgcgattagctattttttctgcacgaatagcccagtcaggttcatttaccagatatttagcataacttttaatagcaaaagaacatgatccagcaggagaaataataggatagtcattaacttcaaaggttttaatcaagtttttcatcgctggaatggcatctttaatatatccactattaatagcaggttgaccacaacagccctgtttttcgagaaaatgaactcgacagcctagtttttctaacagcaatacgctatctcttgccatctgagactttaaagcgtcaccaatgcatgttacataaaaattaacatccatacttatgctcccattgcttttatctatgtagagtaagtaaataagccgagactcatttataaactcatttgtatgacaaatagtgttgcataaaaataatgttaaatatatgtgtataagtgttttttttataaatttacagttttcaagaaataaagaaatgggaatataaagggtatttatgattattttttaataaaaacaatttattactgtggcaaattgagggcgtttattaagtctagttttattacgataaataaagaatttaacgtaagcgaaatagaataaacgcaaaaaagccaacccattgggttggctttctcgtcttatttaatgcttggcagttccctactctcacatggggagaccccacactaccatcggcgctacggcgtttcacttctgagttcggcatgggatcaggtgggaccaccgcgctatggccgccaagcagaattcttcaaattctgtaattattcgtctcatcctgagactcaccccttcggggccagtgctccgcactgttccagtttgttccagacaaactggtcggttttaatcactcgcttctttcctttcggtaagtcgccagtaattcaatcttaaacaagctgacttcatcgtttcgtctctctgacaaaacactttcggtgttgtcaggttaagcctcacggttcattagtactggttagctcaacgtatcgctacgcttacacacccagcctatcaacgtcttagtcttaaacgttcctttaggtcgcttaaagcgacagggaagactcatctcgaggcaagtttcccgcttagatgctttcagcggttatctcttccgcacttagctaccgggcaatgccattggcatgacaacccgaacaccagtggtgcgttcactccggtcctctcgtactaggagcaacccctctcaatcttccaacgcccacggcagatagggaccgaactgtctcacgacgttctaaacccagctcgcgtaccactttaaatggcgaacagccatacccttgggacctacttcagccccaggatgtgatgagccgacatcgaggtgccaaacaccgccgtcgatatgaactcttgggcggtatcagcctgttatccccggagtaccttttatccgttgagcgatggcccttccattcagaaccaccggatcactaagacctactttcgtacctgctcgagccgtcactctcgcagtcaagctggcttatgcctttgcactaaccgcatgatgtccgaccatgcttagccaaccttcgtgctcctccgttactctttaggaggagaccgccccagtcaaactacccaccagacacggtccccgacccagtttatgggcctaggttagaacatcaaacgttaaagggtggtatttcaaggttggctccatgcagactggcgtccacacttcaaagcctcccacctatcctacacatcaaggctcaatgttcagtgtcaagctatagtaaaggttcacggggtctttccgtcttgccgcgggtacactgcatcttcacagcgagttcaatttcactgagtctcgggtggagacagcctggccatcattacgccattcgtgcaggtcggaacttacccgacaaggaatttcgctaccttaggaccgttatagttacggccgccgtttactggggcttcgatcaggagcttcgccttacggctgaccccatcaattaaccttccagcaccgggcaggcgtcacaccgtatacgtccactttcgtgtttgcacagtgctgtgtttttaataaacagttgcagccagctggtatcttcgactggcttcagcgccgtccgcaagggactttacctaccgccagcgtgccttctcccgaagttacggcaccattttgcctagttccttcacccgagttctctcaagcgcctgagtattctctacctgaccacctgtgtcggtttggggtacgattgttggtaacctgaagcttagaggcttttcctggaagcggggcatcaattgcttcaccaccttggtggttcgtcatcacatctcagcattaagtgaccggatttgcctaatcactctgcctacctgcttgaaccgggacgaccgtcgcccggacaacctagccttctccgttcccccatcgcagttaccaccagtacgggaatattaacccgtttcccatcgactacgcttttcagcctcgccttaggggtcgactcaccctgccccgattaacgttggacaggaacccttggtcttccggcgtgcgggtttttcacccgcattatcgttacttatgtcagcattcgcacttctgatacctccagcatacctcacagtacaccttcgcaggcttacagaacgctcccctacccaacaacactacgtgtcgctgccgcagcttcggtgcatggtttagccccgttacatcttccgcgcgggccgactcgaccagtgagctattacgctttctttaaatgatggctgcttctaagccaacatcctggctgtctgagccttcccacttcgtttcccacttaaccatgactttgggaccttagctggcggtctgggttgtttccctcttcacgacggacgttagcacccgccgtgtgtctcccgtgataacattcttcggtattcgcagtttgcatcgagttggtaagtcgggatgaccccctagtcgaaacagtgctctacccccgaagatgagttcacgaggcgctacctaaatagctttcggggagaaccagctatctcccggtttgattggcctttcacccccatccacaagtcatccgctaatttttcaacattagtcggttcggtcctccagttagtgttacccaaccttcaacctgcccatggatagatcaccgggtttcgggtctataccctgcaactcattcgcccagttaagactcggtttccctacggctcccctatgtggttaaccttgctacagaatataagtcgctgacccattatacaaaaggtacgcagtcaccccataaagaggctcctactgcttgtacgtacacggtttcaggttctttttcactcccctcgccggggttcttttcgcctttccctcacggtactggttcactatcggtcaatcaggagtatttagccttggaggatggtccccccatattcagacaggataacacgtgtcccgccctactcatcgagttcacaataacagcatcttcagatacggggctatcaccctttactgccggactttccagaccgttctcctgacactgctattgattaagactctgggctgctccccgttcgctcgccgctactaggggaatctcggttgatttcttttcctcggggtactgagatgtttcagttctcccggttcgcctcattaacctatggattcagttaatgatagtatccattggatactgggtttccccattcggatatcgtcgggtataacggttcatatcaccttaccgacgcttttcgcagattagcacgtccttcatcgcctctgattgcctaggcatccaccgtgtacgcttattcgcttaacctcacaacccgaaagtgtctctttcaaagactatctgggtggtgatggctgcgcagattacatttcttcgttgggcagtgctcgcaatgctcacatacttaagtatgctgcgcttgctgtgcgctgtccgcctcgaactgtaaattgctcgctcatcccactttgatgtcaaaacacattcaaagtttgagattttgagagactcatcaatatacctcgttgttgatatattgatttgttttcaatttttcagcttgttccagattgttaaagagcataataagtaagataactcatttgaattagcttagttattctctgactttcgtcagataagtggtacgcctttcactcataccgcgcattggcgtcccctaggggattcgaacccctgttaccgccgtgaaagggcggtgtcctaggcctctagacgaaggggacttctgtcagcttcgcagacgcgcttttgctcgttcttcatcagacaatctgtgtgagcactgcacataacacgtatctcttaggtaaggaggtgatccaaccgcaggttcccctacggttaccttgttacgacttcaccccagtcatgaatcacaaagtggtaagcgccctcccgaaggttaagctacctacttcttttgcaacccactcccatggtgtgacgggcggtgtgtacaaggcccgggaacgtattcaccgtagcattctgatctacgattactagcgattccgacttcatggagtcgagttgcagactccaatccggactacgacagactttatgagttccgcttgctctcgcgaggtcgcttctctttgtatctgccattgtagcacgtgtgtagccctactcgtaagggccatgatgacttgacgtcatccccaccttcctccggtttatcaccggcagtctcctttgagttcccaccattacgtgctggcaacaaaggataagggttgcgctcgttgcgggacttaacccaacatttcacaacacgagctgacgacagccatgcagcacctgtctcagcgttcccgaaggcactcctctatctctaaaggattcgctggatgtcaagagtaggtaaggttcttcgcgttgcatcgaattaaaccacatgctccaccgcttgtgcgggcccccgtcaattcatttgagttttaaccttgcggccgtactccccaggcggtcgatttaacgcgttagctccagaagccacggttcaagaccacaacctctaaatcgacatcgtttacagcgtggactaccagggtatctaatcctgtttgctccccacgctttcgcacctgagcgtcagtctttgtccagggggccgccttcgccaccggtattcctccacatctctacgcatttcaccgctacacatggaattctacccccctctacaagactctagccaaccagtttcagatgcaattcccaagttaagctcggggctttcacatctgacttaattgaccgcctgcgtgcgctttacgcccagtaattccgattaacgcttgcaccctccgtattaccgcggctgctggcacggagttagccggtgcttcttctgcgggtaacgtcaattgataagggtattaaccttatcaccttcctccccgctgaaagtactttacaaccctaaggccttcttcatacacgcggcatggctgcatcaggcttgcgcccattgtgcaatattccccactgctgcctcccgtaggagtctgggccgtgtctcagtcccagtgtggctgatcatcctctcagaccagctagagatcgtcgcctaggtgagcctttaccccacctactagctaatcccatatgggttcatccgatagtgcaaggtccgaagagcccctgctttggtccgtagacattatgcggtattagccaccgtttccagtagttatccccctctatcgggcagatccccatacattactcacccgtccgccgctcgtcagcaagaaagcaagctttctcctgttaccgctcgacttgcatgtgttaggcctgccgccagcgttcaatctgagccatgatcaaactcttcaattaaaagtgtttgatgctcaaagaaatcgaaaacttagcttattcattatatgaattaacttgttagtcactcttcaagacttgatacatctaattttttagaagatatcgtctctgcgagtgcccacacagattgtctgataatttgttaaagagcagtgcaactatcgctgccgtttccggtcttctgcgttgttgcgaggaggcgtatattacgctattcctctgaagagtcaagagttttttcaaacttttttcttttctcttccctttccgtcgttgctgttgtcagctcatcgtcggtcagtgggtgcgcattataggggcttctcagattagcgcaagtatttatttcaattttttttctgttcgctctatttttcaacaaaacgaatgaaaatgctctaattttacactgatagattaaaatccaaacagctttattgctattactcacgtaatatagaaagcaaattatggtaaaggtaactattattatgcaactaagcgaacaacgctcagcatcccaaaaaaatctttcttatattgttgctgaaaagctaggtaaacaaatactttctggatactacgaacctgaatctttattacctggtgagatagaactcgctgaactactttcagtcagtcgaactgttattcgtgaagcaataaaaatgcttgctggaaaaggtatgttactacctcggccaagaataggtactcgagttacgccaatgcaaaattggaatctattagataatgatttacttaattggtggatagatagcggtgaatttaataaggtgagtcattatttccatcatgttcgtttagcaatagaacctcaagcctgttatttagctgcattacatgcttcagagacacaaaaagagtcgctattatttctagctacagaaatgcagctactcaaagataactttaaccgtcagcattggttagatattgatacacaatttcactatctaatctatcaagccagtggcaatccattttttgcttcttttggttctctttttctatctgcctacaaaaaatattttgatttaattgttggcaatgaaacagtacagcctgaaactcataatcaaattgtacaagcgattatagaaggagatggaaatagagcgcgtgatctttgtttaatactattaataaatgactgagtatttttaatacgattttattgtctttttgtttatactggctaataagctaaatataaaagaaagacggtatctgttacatgttaaaatccgccaaaaatatgtcagggttgccctggatcgctgcaatggctttttttatgcagtcattagatgcgactatattaaatacggcactccctgatatagctaaaagtcttaaccactcccctctcgccatgcaatcagccgtaattagctatactttaacggtagctttattaattcctgtaagtggatggttagctgatagatttgggactcgcaagattttcattatcgccgtttcactcttttctggcggttcattattatgcgcactttctcctaaccttgcttttttggtaatttcgcgggttatacaaggaataggtggtgcaatgatgatgccggttgctcgtcttgctttattaagagcttatcctcgtagcgaactccttcccattcttaactttgtcaccatgccggggcttgtggggccaattgcgggtccattattgggagggatccttgtcacctatgcttcttggcattggatatttattattaatattcctattggcttacttggtattttttacgccataaaacatatgcctaattttacgatgccaaaacgtaaatttgacttactcggttttattttctttggttttggtttagtcatgttatccgtcagcctcgatctttttggcgataaaaacatctctcgatatatccctcttgcggtgattttaggtggcttctttttactcggtctctatatcaatcacgctaaacgccaccagcaacccttaataccattaaatatattcaaaacacggactttctctgtcggtattgcgggtaatatcgcaacgcgcttaggaacaggatgcattcctttcttaatgccactgatgttacaagtaggttttggctatcctgctattatctcaggtatgatgatggcaccaatggctttgggctctatactcgccaaatcctttgtgacaaaagtcttagtgacatttagctatcgccggacactatttggaataaccattattataggtctgatgattgcacagttttccttacaatcacctgatatgtctatttattacctagtattaccactctttttattaggtgttgtcatgtcaattcagtttacttcgatgaatactatttcactcgctgacttaactgacaataatgccagttcaggcaatagtgttttagccgtcactcaacaactagcgattagttttggtattgcagtaagtgcttctatcttaaattattttgatgcagaaaatgccggctctacggtagataacttccattatacttttattactgtcggcgctattacactactctcttcatttgtcttcttattacttaataagcatgatggtgataatcttactaataagaagaaaaatgaaaactaattagttgagatataaaaataaaagagagcctatagctctcttttatacgccactctaaatagcgataatcttatttttacgctagtcatgctgcgacaaaaaagcttcaatttcatggcgccaaggtactgacggttgtgctcctgcacgagtaacagcgatagcggcggctgcatgcgcaaatttaatcgccttcatcattggtaaaccttctaataaagccgttataaaagcgccattaaatgtatctcctgcagcaatagtatctattgcggtcactttaaatgccggaaccatcgttccttgattgttttgactaacccaaacaccacggctacccaaagtaattaaaacggtttctatccctttatcatgtaatatattagatgcacgttgagcactttcatcatcaataacttttacccccgtgaggtattcagtttctgtttcattaggtgtaatgatatcaacgagagataataattcatccggcaaagcctgtgctggtgctgggtttaatatgacttgcacactttcttgtttagcgacttgagccgcttttaatacagaatctagaggtgattctaattgcataagtaaagcatctgcttttttaatcaccgagttataacgttcaacatattctctgtttaaccttccattggctccagcgtgtataccaataacgttttcaccttgctgattaacaaaaatcaacgcaacacccgtggcttcatcatcaattaattcaatacaatctgtatctattttatctgtgatcagctgagctttagcactttgaccaatatcgtcatttccaagacaagctaaaaaggtaatattagcaccacaacgccctgcagcgacggcttgatttgcacctttacctccaaaaaccatctgatactgattaccggaaatagtttcaccaggatgcggaaaatgagcaacattaagaatatgatcgacattaacactacctaaaatcactaatttcttcgcttccatgatatttccttactatcaagtgataatgttttaatgccattaattgatgacatgtcgtattttaaatcgatcatctcagcaacattaatgaaaaaacgtgatcaccatcgaaacgtttcgccagcaaaacaaaaaagaaccaaaagaagcagtaggaagctgaatcgatttttgttataaacgaattgtgtactaattgaataattgactatatgtcattactcattttttgatagtttcatctctataacgaaaataagtaccctaattaggagcctttatgcaacttgcagaacggatctcacaacttagccaataccttgaaactgggctttatgaacgtcaatcagcgatacggctttgcttactcgcggctttaagtggagaaagcgtttttttgctaggtcctccaggtattgctaaaagcttaattgcgagaagaatgaaagaggcatttaaacacgctaaagcgtttgaatatttaatgacccgtttttcaacacctgaagaaatttttggtccactatccattcaagcattaaaagatgaaggaaaataccaacgtttaaccgaaggttatttacctgacgccgaaattgtttttcttgatgaaatatggaaagccggtcccgctattttgaataccttattaacggcaattaatgaacgtaaatttcgcaatggcgaaaacgaagtaagtattcccatgcgtttgttagtttcggcttctaatgaactacctgattcagacagcagtcttgaagcgctttatgatcgaatgctgattagaatttggttatcaaaagtacaagataaaaaaaacttccgggcgttattagttaataaagaggtcagcgcttttcgtattcctgaacaactacaaattacaacagacgaatttttactttggcaaacagagttagaaaaaattactttgaatgaccacttattcgaattaatttatcaacttcgcaactcactcgataaaagtgatgcagcaccttatgtttcagacagacgttggaaaaaagcggttcgtctattacaggccagtgctttttttaatggtcgtagtgcgatatcacctttagatcttattctgttaaaagattgcctttggcatgatcaagcttcttttgcgctgctaaatgacttattaaaaacactattaacagaacaagcataccaccagctaacacttttacagaaaatagaaaatctgtgggctgaatggatgcaatcgacaagaagcaaacaagatcaacaagcatttcgctttgaaaaacaaagtagtatgtttggtagaaatatacatttcaaattatcagaaaaaatgcagtctgataaatttacgctgtttttacatattccactgcatatacatagtattcaagttaactttataactgttgagaaaaaagcattagaaactttcttagataaaggtgatgaactctctgccagattaaatggtattggtttcccacaatctattaatgcacaaattcgtcaagatggtgtcttagaggtattggatgttagtcgccgaacaacgtcgttataccaacagtcagaaagcatcaaaacagagcctattgaagataatcaacaatggttagataaattaaaagatctcacccaagagatttattctgaacaagaaaattttaatcatcatcaacctaatatctttattgataatgattggctcatttctatagaacaaagctttttgcaattaaatgaaaaattatctcaattaagaagtcaaataaagtgaccatgccatgctaacactttctaccatcgatatgcttttagcgataaacgaagggcagcttatagaagaagtgattatcactttattagcttctcctcaattagctgttttttttgaaaaacacccaagattaaaaaaagcattactaaaagacatttatcaatggaaaaaaagcttacaagaaaaagtgaaagaaacactggtgccgaccatcatcgcagatgaatttgcactttatcagcaaacgcaatcattatgtaatgctgtttttaatcagcaagtggacaatattcttacagaactaaatcagcttgattcttcatttgttatagaagcaacacaactaataaaaacaaataaacctttttctccagctcaacaagctctatttattcaacgctggcgcattagtttaatatttcaagtcacgacattacataaagcactgtttgaacaagagcaagagcagttacttgcagaactacaagaacgcttagcattaagtggcagtttaagtaatacattttctgaaaatgaacgggctgcaggccgtttatgggatatgagcaaaggcgttattaccaaaaccccctatgatgagaaaattattcaacgttatagtgattttctaaatcaacaacctgaattacataaattggccagcttactggggcgaagtaaaacggcgaaatcgcttcctgaagagagtgtgatttttgaatcaataacaatcgttgaaaaagcaccggataccacgccagagcaagtaaatggtataggcttaagtgatgatattttacgtttattacctgctgaactagctttattaggcataaatgaagttgagtatgagttttatcgtaaactcattgaaaaacagctcaatacttatcgtttacagggtgatagttggcaggaacgcacagtattacgcccagtcactcatcaccttgatgaagaacggccaagaggcccttttatcatttgtatcgacacttctggctctatggggggatttaatgagcaatgtgctaaagcctttggtttagcactaatgaaaatagcactagcggataaccgtgcctgtcatgtcatgctgttttcaacagaaatgatccattaccaattatcttcttctgatggattacaagaacttgttaaatttttgaatcaaacatttagaggtggaactgatttagcatcttgtttaaatgaggtagcagataagcttaatacccccacatggaaagacgctgatgctgttgttatttctgactttgttgcccaaaggttacccgaaaacctaatcaataaaatcaaaaaagtccaacagcaacagcataatcgcttccatgcggttaccctatccaattatggtaaacccagtattatgaaaattttcgaccacatatggcgttttgatactgggttaaaaagtcgattactacgacgttggcgtcaataattacagcatatccgcaaaagctaaacgggtgtcttgttgccaaacgccacattgtacttgtccaatatgctctttttgcaaaagtagcatgactaaacgtgattgacctataccgccaccaattgtttgtggcatatcgccatgcattaatgctttgtgccaatctaactcaagacgttgagtatcatcagttaaagttagctgacgcattaatgtctctggatcaacgcggatacccattgacgacacttcaaaagcatcttgcaatactgggttccaaactaaaatatcgccgttcaaccctgcaaagccatcttcgttaggtgttgtccagtcatcataatctggcgctcttacatcatgagcttcgccacttgatagttttccaccaataccgattaagaaaacagcaccatattctttagctatcgctttttcacgacctttagcatcaagatcagggtagcgacgtaacagttcttcagtgtgaataaattgaatttgatctggcaggaacggtgtcagaccaaattcatcgctgacggctttttcagtttcttttatagcctgatagattttacccactgtctgcttaaggtaaggtagtgtacgctcctcaccttccatcactttttcccaatcccactgatcaacatagacagaatggattggcgttaagcgatcttcatctggtctcaaggctttcatatgtgtataaagaccttgaccagaactaaatccaaaacgacctaatgttttacgtttccattttgctaatgaatggacaacttcaaaggtagaatcaggtaaagatttcactttaacctgtacggccttctcatgaccagataagttatcttgagttccatcaccaaggcgacttaagatcggtccttgaacttcaatcaggcctaattctttttctaataaacgtgaaaaatatgatttaacaaagctaatttgttgttgagtctgaatgaatgatttttccattttttatatccctagtggcgatgttgtgttttgctgagatagattaagcaacaaaagtgggggtaaattcaatatacttcattaaaaatagccttgcctatttaaaatcgttaaaaaaaacactataaaaatgcattatcattaaaaacagggggattttatggacaatatttatcagatcgataatctcgatcgtgacatacttcacgctttaatggcgaatgctcgaacaccttatgctgaattagctaaaaaatttgcagtaagtccgggcacaattcatgttcgtgttgaaaaaatgaagcaagcaggaattattacggggacacgcgtagatataagtgaaaaacaactagggtttgatgtttgctgctttattggcatcattttaaaaagtgccaaagactaccataccgcattagataagctagataagttagatgaagtggttgaggtttattatacaacaggtcaatacagtatctttattaaggtaatgtgtaaaagcatcgaagcgcttcaagacgtacttatcaacaaaattcagactattgatgaaatccaatcgacagaaaccttgatctctttgcaaaacccgataacaaggacaatcaagccataacgaaaaaaaactatttttttttataaccacattatccacaggtagatcccaagtgattcacagcgtacaatagcgcgtcttgaacataaggagatcatgaatgaaaaaagtcacgctaattagtggcagcaccatgggtagtgctgaatatgtcgccgaacacctcgaagagatcttatctaaagagggatttgagacagatctacaccatgggccttctcttaatgatcttccgcaagaagggatctggttggtgatcacttccacacacggtgcaggtgagatcccagataacctccagccatttgctgacgaaatctcagcagacggcattgatctaagtaaagtttctttcggtgctgtaggtataggaagtagtgaatatgacactttctgtggtgcgatcagaacattagatcaaaaactaatagaaaaaggggctgttcgattaggtgatcgcctagaaatagatatacaagaacacgacattccggaagatccagcagaggaatggcttacaacttggaaaaatttactttaaatcgaacaaaaaaacagcaatcagatgtggataactatgcttaaaagcaggggttaacccgtagttatccattgtataagcctatatccagaaatgacctgtgtataactcgctgttttgatcccagcttatcagcatctagatcacggatcattcacagtatatgatcctttacacttttatgatctttaaatagaaaatccacttatccacagaggatcgcttccttaataaaagatctaataaagagatctttaaataaaaagatctttaaataattacctgcggatcatgctcacttgtatctgtcaaaaagttgagtagaattcgttttcccaatgcaacacattcagcatttcgtaacatttaaggttcacacatgttttatccagaacattttgacgtcattgtcatcggtggtggtcacgccggtacagaagccgctatggctgcagctcgtatggggcgtcaaaccctattactgacccacaatattgatactttgggccaaatgtcttgtaacccagctattggtgggattggtaaagggcatctggtaaaagagatcgatgccatgggtggattaatggccacagccatcgaccatgctggtattcaatttagaacccttaatgcaagtaaagggccagcagtaagagcaacaagagcacaagccgatcgcgtactttatcgccaagctattcgcacaacccttgaaaatcagcctaatttaatgatcttccaacaacccgttgaagatctcattgttgaaaatgaccaagtaacgggtgcagtcactcgtatgggattaaaattccgtgctaaagcggtagttttaaccgtaggaactttccttgatggaaaaatccacattggtttagaaaattacagtggtggccgagcaggtgatccaccatcagtctctttatcacatcgattaagagaattacctttacgtgtaggtcgcttaaaaacaggtacaccacctcgtattgatgcaagaactatcgattttagtcaattagcgccacagttaggcgataatccaatgcctgttttctcatttttaggtaatgtggatcaacatcctgaacagatgccttgccatattactcatactaatgagcaaacacatgaaataattcgtaataaccttgagcgcagtcctatgtatgcaggggttattgaaggtatcggccctcgttattgtccatcaattgaagataaagtgatgcgatttgctgatcgcaattcacaccaaatctttttagagcctgaaggcttaacaagcaatgaaatttaccctaatggtatttcaacaagcttaccttttgatgttcaaatgcaaatagtaaattccatgaaaggtatggaaaatgccaagatcatccgacctggttatgcgatagagtatgacttttttgatccccgtgatcttaaacaaacactcgaaagtaagtttatcaacggattattctttgctggccaaattaatggcactaccggttatgaagaagcagcagcgcaaggtctattagcaggtcttaatgcggcacgttatgcttttgatcaagaaggttggttccctcgtcgtgatcaagcctacattggtgtattagttgatgatctttgtaccttaggtacgaaagagccataccgaatgtttacttcacgtgctgaatatcgcttgatgttacgtgaagacaatgctgatttacgtttaactgaaattggtcgtgaacttggtatggttgatgacaaccgttgggcgcaatttagtgaaaaagtcgaattagttgaaaaagagcgtcaacgtttaagagatatttgggttcatccaaaagcggataacctagaagaaatcaatcaattacttaaaacgccactgtctaaagaggcgaatggggaagacttattacgtcgtcctgaaatgacctatgagattttgaaaaagatccctcgttttgctcctggtattgatgattcgagaccacaagcggcagagcaagttgagatccaagtaaaatacgaaggttatatcaatcgtcaacaagaagagattgaaaaacaactgcgtaatgaaagtgctgcattgcctattgatatcgactacaaacaggtgagtggattatcaaatgaagttattgccaaactaaacgatcacaagccaacttcaataggtcaggcatcgcggatctccggtgtgacacctgcagctatctcaattttacttgtttggttaaaaaaacaaggtttattacgccggagtgcatcatgagtgacttacttaatcggttaaaaaagctggcaaagcaagccaatattgagttaactgatgttcaagctcaaaaattaaccgcttatgttgctatgctcgataaatggaataaagcatataatttgacctctgtcagagatcctcaacagatgcttattcgtcatatcttagacagcatagttgtgagtcaataccttaaaggaaacaacttcatagatgttggtaccgggccaggattgcccggtattcctttagcaataatgcgtcccgatcaccactttgtgttacttgatagcttaggtaaacgcgttcgttttatgaaacaagttcagcatgaattagctctgcataatatcgaacctgtgcaatatcgagttgaagagtatcaagtagaaaaaccatttgatggtgtgattagtcgtgcttttgcctcgatgaaagatatgctttcttggtgttcacatttagtcactgaagaacacgggcgtttttatgcattaaaagggcagattcatcaagaagaacttgatgagctttctgaaaatggtttaaagatgcctgaaaaggtgattaatttagcgatccccgaattgaatgaacagcgtcatctggttattttttaaactgtagacggctattcatcggcttcttttttcattttttgtgctttagcgataacatttacaatgttatcgctatttactttaagggataaaatagcgtcattccatatttacccatattttacaattaagtaacaaataattatctttttatttaattgcctgtattcccctcatttttttatttttctttctaaaataaattaataaatttatgcattctcaaaaatatttaatttatttaattgaaaaatcattaattatttttctttttggctgtttttgttcagaaaaaggcagttatttgttaactctattataatttttatgaaataaaatttatttatatactattttgtgtgttctagatcacattattttttctgtttatgctgattatttttgcgctttttgttgctaatcattttccataaatggaaccttcataaaaaatttaaattattcttcactttttcgctacttattgattgaattcattgccacgccccgtataatttgctcgtttttgtcacttgacactttatagcaaagacagtttgatacattattcagtaataccttttacgatagcgagtctggagaatacaaacgtcatgtctgtctccctctacagcgggaaagttgcactgaaactgttatttttgcagtttatgacttttgttattctcagtgcgggtttctactttaagagtacagactggagcttttctgcttttttaggtggaattgcatgttggttacccaatattgcatttttattattactacgcttacaaaaagtagatgaaaatgaagcttcagttcgcataaactggctttttgctttcagtgaagggttgaaggttatattatcaatagccttgctgatagttgctttaggagtgtttaaagcggcatttgcaccactggtcatgacctacttagcggtgcttgttatgcaggtcgttgcaccagccgtcataaacggttagcgtttttaacaacaaaagggtaattggcatcatgtctgcatcaggagaagcattaaccactagagactacataggtggacatctgaataaccttcagttggacctacgtactttcgagttggtcaatccccatgctgaaaatacgccatcattctgggtgttaaatattgactcacttttcttctctgtactcatggggcttttgttcctatggatatttagaaaagtagcagtaaaagcaaccagtggcgtaccgggaaaattccagactgcagtagaaatggtcattggtttcgttgatagcagcgttcgtgatatgtatcacgggaagagcaaagtcattgcacctttggcattgactgtgttcgtttgggtgctgttaatgaatgccctggatttattaccaattgattttatcccatatatcggtgaacacatcttagggttaccagcgttacgcatcgttccgactgctgacgtgagtatcactctttcgatggcaattggtgtatttatcctgattctcttctacagcattaagatgaagggcgtaaaagggtttactaaagagctgacgttacagccttttaatcaccctgtatttattccaatcaacttaattctggaaggggtaagcctgctatcaaaacctgtttcactcggtcttcgactgtttggtaacatgtatgcgggtgaactgatctttattcttattgctggtctgttaccgtggtggtcacagtggttattaagcctaccttgggcgatattccacatactgattattacgttacaagcctttattttcatggttctaacgattgtttatctgtcgatggcatctgaagaacattaattattaactctttaaagaaataactgaaacaaactggagactgtcatggaaaacctgagtatggatctgctgtacatggctgccgctattatgatgggtttagctgcaatcggtgctgcaatcggtatcggaatcctcggaggcaaatttttagaaggtgctgctcgtcagcctgatctgatccctcttctgcgtacacagttctttatcgttatgggtctggttgacgccatcccaatgattgctgtgggtctgggcctttacgtgatgtttgctgtcgcctaatgatggtgatgagcagtaaaaacatcaagttagttaataaccaagaaagaggtattgtgctgtgaatttaaatgcaacaatcctcggccaggccatcgcatttgtcctgtttgttttgttctgcatgaaatatgtatggccaccaattatggcggccattgaaaaacgtcaaaaagaaattgctgacggtttatcttctgcagaacgtgcgaaaaaggacttagatttagcgaaagccgatgcaggcgaacagttagcgaaagcaaaagctgaagcacaagcaatcattgagtctgcgaataaacaacgcactcaaatgattgaagaagctaaagctgaagcagagcaagaacgtagtaagatcgttgcacaagctcaatccgaattggaagcagagcgtaaacgtgctcgtgaagaacttcgtaaacaagtcgctatgctggctatcgctggtgccgagaaaattattgaacgttccgtggatgaagctgctaatagcgacatcgttgataaactggtcgctgaactgtaaggagggaggggcatgtctgaaatagcaacggtagctcgcccctacgccaaagcagcttttgactttgctgtggaaaaccaggctgtcgataaatggcaggttatgctggcattcaccgctgaagttgcacgcaatgagcaggtaaccgaattactttctggttctttagcatcagaaaaactggctgacatctttatcgacctttgtggcgatcaaattgatgaacatgctcagaacttaattcgtgttatggctgagaatgaccgtttatcaacattgccggaagtattgagccaatttattcaattgcgcgcagtactcgagtcaacggttgatgttgaagtcacttctgccattgagctaactaaacagcagctagctaacatttctgcagcgatggaaaaacgtctatcacgcaaagtgaagctgaattgcaaaattgataagtccgttatcgcaggcatgattatacgcgccggtgaccttgtcatcgacggtagtgttcgtggccgtttagagcgattaactgacgtcttgcagtcttaaggggactggagcatatgcaactgaattccactgaaatcagcgaactgatcaagcagcgcattgctcagttcaatgtagtgagtgaagctcacaatgaaggtacgattgtttccgttagtgacggtatcattcgtatccacggtttagccgaagttatgcagggtgaaatgatcgcactgccgggtaaccgtttcgctatcgcattaaacttagagcgcgactctgttggtgcggttgtgatgggtccttatgctgacttagcagaaggcatgaaagttaaatgtacaggtcgtattctggaagttccagttggccgtggtctacttggtcgtgtagttaacacactgggtgaacctattgatggtaaaggtgctgtagagcatgatggcttctcacctgttgagatgattgctccaggtgttatcgaccgtcaatcagtcgaccaacctgtacagacgggttataaatccgttgacgccatgatcccaattggtcgtggtcagcgtgaattgatcatcggtgaccgccaaacaggtaaaactgctctggctgtcgatgcgattattaatcagcgtgactctggcattaaatgtatttatgtcgctatcggtcagaaagcatcgactatttcgaacgttgttcgtaaattagaagagcatggcgcgttagaaaacaccattgttgttgttgcttctgcatcagaatcagcagcgttgcaataccttgctccttatgcggggtgtgcaatgggtgaatacttccgtgaccgtggtgaagatgctctgattatttatgatgacctgtctaaacaggctgtcgcataccgtcaaatttcactgttacttcgtcgtccacctggacgtgaagcttaccctggtgacgttttctatctgcactcccgtttattggagcgcgcagcgcgcgttagcgctgagtatgtagaaaactttactaacggtgaagttaaaggtaaaaccggctcactgactgcgttacctattatcgaaacgcaagcaggggacgtttctgcattcgttcctacgaacgtaatctctattaccgatggtcagatcttcttagaatctaacctgtttaacgcaggtatccgtccagctgttaacccagggatctccgtatctcgtgtaggtggtgcagctcagactaagattatgaagaaactttctggtggtatccgtactgcacttgcgcagtatcgtgagctggcagcattctctcagttcgcttcagatctggatgatgctacccgtaaacaattgaaccacggtcagaaagtgactgaattgctgaaacagaaacagtacgaaccaatgtctgtcgcacaacagtctttatctctgtttgctgcagaacgtggttatctggaagatgttgaaatttcaaaagttgtgccatttgaagcggctttattagcttatgcttctcgtgaacatgctgatttactgaaagaaatcaaccagaccggtacttataacgaagaaatcgaagcgaagctgaaaggcgtgctagacaacttcaaagcgactcagtcctggtaataactattcggcctaataatgatcattaggccgtctggttcatgaggagaagcagaaatggccggcgcaaaagagatacgttcgaagatcgccagtgtgcaaaacacacagaagatcactaaagcgatggagatggtcgccgcgtcgaaaatgcgtaaaacgcaggaacgcatggcagccagccgtccttatgcagaaaccatgcgcagtgtgattggtcaccttgcgttagggaatctggaatataaacatccatacctcgaagagcgtgaagttaaacgtgtcgggtacctggttgtttcgaccgaccgtggtttgtgtggtggtttgaacattaacttgttcaaaaaactgctggcagacatgaaagagtggtctgataaaggtgtagaagtagatttagcccttgttggttctaaagccgtttcattctttgcctctgtaggtgggaatgttgtcggtcaagtaaccggtatgggtgatgatccgcaactatctgaccttatcggcccagtcaatatcatgttgcaggcttatgacgaaggtcgtttagataaactgtatgtggtggcaaataagttcatcaataccatggcccaagagcctaaaattctgcaagttttaccattaccaccaggtgatgatgaagaactgaaagaaaaatcttgggattatctgtacgaacctgatcctaagacgttactggatactttactgcgtcgttatattgaatcgcaggtttatcagagcgtcgtagagaacttagcgagtgagcaggcagcacgaatggtcgcgatgaaagccgctacagataacggtggtaatctgattaaagaactgcaattggtgtacaacaaagcacgccaagcaagcattactcaggaactgacagaaattgtatctggtgcagccgcggtataacagctaggtttacgaattacgtagaggattcaagatggctactggaaagattgtccaggtaatcggcgccgtagtggacgccgagttccctcaggatagcgtccctaaagtatacgacgctcttgaggttatgaatggtaaagaaaaactggtgctggaagttcagcaacagttaggcggtggtatcgttcgttgtatcgcaatgggtacatcagacggtttaagccgtggcttaaaggttgaagatttaggccacccaattgaagtaccagtaggtaaagcgactttaggacgtatcatgaacgttctgggtacacctattgatatgaaaggtgagattgaaaccgaagagcgttggtcaatccaccgtgaagcaccaacttacgaagagttatcaaactctcaagaactgcttgaaaccggtatcaaagttatggacttaatctgtccatttgctaaaggtggtaaagtcggtctgttcggtggtgcgggtgttggtaaaacagttaacatgatggaattgatccgtaatatcgcgatcgagcactcaggttactctgtatttgctggtgttggtgagcgtactcgtgagggtaacgacttctatcatgaaatgacagattctaacgttcttgacaaagtatcgttagtttacggtcagatgaatgagccaccaggaaaccgtctgcgtgttgcactgactggtctgactatggctgaaaaattccgtgatgaaggccgtgacgtactgttattcgtcgataacatctatcgttacaccttagccggtacagaagtatcagcactgttaggtcgtatgccatcagcggtaggttaccaaccaacattggctgaagagatgggtgttctgcaagagcgtatcacttcaaccaaaacaggttctatcacctctgttcaggcggtatacgtacctgcggatgacttaactgacccatccccagcaaccacctttgctcacttagatgcgacagtggtactgagccgtcaaattgcttcgttaggtatctaccctgcggttgacccactggattcaaccagtcgtcagttagacccactggtagttggccaagagcactatgatgttgctcgtggtgttcagtctatcctgcaacgttatcaggaactgaaagacatcatcgctatcttaggtatggatgaactgtcagaagaagataaactggttgttgcgcgtgcgcgtaagatccagcgcttcctatctcagccattcttcgttgctgaagtatttaccggttcaccaggtaagttcgtttccctaaaagacacaatccgtggctttaaaggtattctgaacggtgattatgaccacctgccagagcaggcgttctacatggttggtactatcgaagaagcagtagaaaaagctaagaagctttaatacggctgacgggaggttgatatggccgatacatcgttccacctgaaagttgtcagcgctgaaaagcatttatatgacggcgaagtcaaacatattcaggtaactggtagcgaaggtgagctcggtatttatccgcagcataccccgttattaactgccataaaaccgggcatggtacgtgtcgtaaaaacatcgggtgaagaagagtttatctacctttctggtggtattctcgaagttcagcctacaggcgtcattgtactggcagatacagctatccgtggtcgtgatttggatgaagcgaaagcgttggaatctaagcgtaaagctgaagaacacattcaatcctctcatggtgatgttgattatgctcaagcatcagcagaattagccaaagcgattgcaaaactacgtgtaatcgaattgactagacgctaatgtaaataggcagtccatgaataaaaagccagttagttatagctaactggcttttttgctttcagaaatattttgtgtaacgaaatatgtagtattatttggcataaacaggtttacttgccattctttacgggagttatcaggttaattatgtctaattcagctaaaagtgttgttattcttgctgcgggaaaaggtacccgtatgtattcacagttacctaaggttcttcataaacttgcgggcaaatccatggtgcaacatgtcattgataccgcaaaatcccttggtgctcaacaaacccaccttgtttatgggcacggtggtgaacttatgaaagaaacattaggttcacaacctgtcaattgggtgctacaagctgagcaattaggtaccggtcatgctatgcaacaagccgcacctttctttgctgatgatgaagatatcctaatgctttatggtgatgtaccgcttatcactaaagaaaccttagagcgtttaattgcggtaaaacctgctggtggcattggtttattaaccgttattttagataaccctatggggtatggccgtattgttcgcgaaaatggcgatgttgttggtatcgtagagcaaaaagacgcctctgaagaacaattaaaaattaaagagatcaatactggtatattggttgctaatgggggcgatttaaaacgctggttagcgaagcttgataataacaatgctcagaaagagtactacattactgatattattgcgcttgcacaccaagaaggtcgtaaaatcgaaaccgctcaccctactcgtcatagcgaaatggaaggggttaataaccgcttacaacttgccgcattagagcgtatttatcaaacagaacaagctgaacgcttattacttgaaggggtaatgttgcttgatccggctcgttttgatttacgtggtacgctaactcacggaaaagacgtggtgattgatactaacgttattattgaaggtgaagtcactttaggtaataacgttgaaattggtacgggttgtgtactgaaaaactgtgtgatcggtgatggttcgattatcagcccttatacggtgatcgaggatgcaaatttagcgcaagagtgtactgttgggccttttgctcgtcttcgccccggcgcacagctggcagacaaagctcatgttggtaactttgttgagatgaaaaaagccagtctaggcgttggctctaaagcgggtcatcttacttatttaggtgatactgaagtgggtgctaatgtgaatattggcgctggcactatcacttgtaactatgacggtgcaaataaatttaaaactatcattggtgatgatgtgtttatcggctctgatactcaacttgttgcccccgtttgcgtggccaatggcgcaacaattggtgcaggtacaacattgacaaaagatgtcaacgaaaacgaattagtcattagtcgagttaagcaaacacatatctctggctggaaacgtccggtgaagaaaaaacaataattttaagataagggcgtatatttcattatcgcccttttcttgtacgctattattctaaaaacaaaaatatccccgttttctaccatggcttggggaacaaaataatcaggtataaagacatcaagtgcgaaaaacgcacagttttaggaataacacaatgtgtggaatagtaggtgcagttgcacaacgcgatatcgcagaaatcttaattgaaggtttacgtcgtttagaataccgcggttatgattcagcggggttagctgttgtcgataatgattgtcatatgacacgtctgcgtgaagttggcaaagtacagatgctggcagaagaagcagaaaaaacacaagttattggtggtacaggtattgctcatacccgttgggcaacccatggtgaaccttgtcaagataatgctcatcctcatgtctccggcactattgccgtggtacataatgggattattgaaaactaccaagagctaaaagctgagttaattaaccggggctatcagtttgcctctcaaactgatactgaagttattgctcacttagtcaattgggaacagcgccaaggcggcacattacgtgaagtcgtacagcgtgtgatccctcaattacgtggtgcttacggtactgtcattatggatagtcgtacaccagagctattagtggcagcacgctcaggaagcccactggtggtaggtcttggtgttggggaaaacttccttgcttctgaccaactggctttattgcctgttactcgccgctttatctaccttgaagaaggcgatattgtcgaaattactcgtcgtcatgtgcatatttatgatgttaatggcgaagaagttaatcgtgatattattgaatcgaatgtgcaatatgatgcgggtgacaaaggtatttatcgtcactatatgcaaaaagagatctacgaacagcctttagccattaaaaacacccttgaagggcgtttaaaagcagaaagtattgatcttagtgagttaggatctaaagcaccagagatcttatctcaagtggaacatattcaaattgttgcctgcggtacatcttataacgcaggtatggtatcgcgttattggtttgaatctttagcggggatcccctgtgatgtggaaattgcatcagaatatcgctatcgcaaaccagcgactcgtcgcaatagtttactgataaccttatctcaatcaggtgaaacggcagatactctagcagcattacgcttatcaaaagagttaggttatttatcatcgctggcaatttgtaatgtggctggctcttctttagttcgcgaatctgaatttgtgctaatgactaaagcaggggctgaaattggggttgcatcaaccaaagcctttacaacgcaactggccgttttattaatgctagtggcctatatgggacgcattaaaggtgttgaagcccttgaacaacaagttgcaatggcgcttcatgcactaccgagccgtattgaaagtatgttgtcgaaagataaagtgattgaagctttagcagaagacttctcagaaaaaagtcatgcactcttcttaggccgtggtgatcaatatccaatagcggtagaaggcgcattaaagttaaaagagatctcttatattcatgcagaagcttatgcggctggtgaattaaaacatggacctcttgctttaattgatgctgatatgcccgttatcatcgtagcgccaaataatgaattattagagaaattaaaatctaatattgaagaagtgcgcgctcgtggtggtttactgtatgtgtttgccgatcaagatgctggctttgaagaaagtgaaacaatgaaactgatttctctgcctcatgttgaagagttaattgcgccaattttctatactgtaccattacagttactttcttatcatgtggcgttaattaaagggactgatgtcgatcagcctcgaaacttggctaaatcagtgactgttgagtaatattatttaatagtttattgccaattttgccccgtatcttaattttaggtgcggggcatttttaactcactattatttttaagttctttgttattaaaaaacattacaaaaataaataccagtgtaaaaagtgaatagattaaaaagtgcgtaaggtttttatttttttatcagataaatatattattactataaatatatcgaagaaaattaaaataaaatcaataaggtatctttttaatgtaacgcctaaaaataatagagatgttattaataatctttctacaatataaatttaaaatctatattttatctttgtaataatagtctagtgactagtcatttaaaaaaaatataaatcagttttaaattttcataaaactttaatcattgtcgcttaatctctagtcaatcatcataaattggcgtggtaagcgatatgttacagttcaatataaactcacaaaatggctcaatgccacatattcgtgtagagaatattcaaaagagatttaatcaatttattgctttagatggtgtttctttagagattaaacaaggcgagttagtctgcctattagggccttctggatgtggaaaaaccacattattacgttgtattgccggattagaaacacaagatcacggtagtatctttaattacgataacaacatctcacaccttccccctcaagcccgtgactatgggatcttatttcagtcctatgcattatttcctaacctgacggtacagtagaatattgcgtatggtttagccggtcagcctcgtaatgtgattaaaaatcgcgttaatgaaatgctggagttagttggtttacaagaccgaaagaaaaaatatccaggagaattatctggcggtcaacaacagcgtgtggcattggctcgtgctttggctcctgccccttctttactattactggatgagccaatgtcggcattagatgcacaagtgcgtgaacatttgtgtgtggagctacgtaatttacagcaaagcttaaatatcactacgctaatggtcactcataatcaagatgaagccatgctgatggccgataggatagctgtaatgaataacggcaaggttgagcagtacggcagtagtgaagagatttacaaccatccacaaacaccatttgttgcagagtttgtaggaaaaggtaactggttacctttcaatagaaatcagcacggtgaggcgatgattggctcacgagaagtccaattaaaacatactgcaatacctcataatcaagggcgtctcttttgtcgacctgaatcaatcaaaattaacccaatacaaaacaaacataatcaatacgatgccaatatacaaaatgtggtgtttttgggaagtcgttgcattatgaagtttgaattagaccatttaccgggacatttattacaagccgagatctctgctgctgagctacatagtattcaaaacggtaaagttaaagtgactttaccggctaatgaactacacatatttgcgtaaggtagcgagataatgtcagtgatagtacctaccaaatctattaatcgtttagatagtttatttgttgctggtggtaagttatttattatttgcttacttattcttggggttttattgcctttattggctattttctggcgaggttttacgcctgatatatcacaaggtggtggttttcaggctgccattgatttgttcaccagtgctaattttctgtggttggtgggtaacagtattagtgtttcgctaagcgttgctgttattacggtgccactggcttacctgtttgcttatgctctacatcgcaccttgatcccttttaaatccttgtggcgtggaatatcactattacccttactcgctccttctatgctaccgggtattgcattggtttatctatttggtaaccaagggctattgcgtagcttactcacagagagtatttatggttattggggattagtgcttggtgaggtgatctacacttttcctcatgcgctaatgattttactctccgcattatccatgtctgatgctcgtttatttgatgctgcatctagcttaggggcctcttcttggcgcacttttcgtagtgtcacttggtcatcgagccgacatgggattttcgcagcattgtgcttggtatttacgttaactattactgactttggtattccggttgtcgtcggcggagattatcaagtactggcgttagaagcctataaagccgtgcttggtcagcaacaatttggccgcggtgctttaatcggtatgttgttattgctacctgcattgttgaccttcggtgtcgatgtttggttacgtaaacgtcaacgtgatgcaatgagctcgcgtgcccaattctatttaccaaaagctaattttcagcgtgacacgctttatctaatatttgtgatgcttatttgcgcgctatttttattggtattcggtacggccgtttattcctcttttattcagttctggccttataacttatcgttttcgttacgtcattataattttgaaggattgcctgggggatggctcgcctataccaacagtattattttggcattttacactgccactatcggctgctttctgatctttatgggcgcttacttaatagagaaaacggcttctcactcttggcttaacaatctgctacgtatgttaagttttgtaccgatggccgttccggggttagtgttgggattagggtatgtatttttctttaacttaccgaataatccactgaactttttatacggcagtatggtgttattagtgctgtgctccattgcacactttttcactactgcctatatgactgcgagcacggcactgcgccagttagataaagaattcgaggcagcttcattatccttaaaagcgcctttatatcgtcacttttggcgtatcactattcctctttgtttgccggcattattagatatttatcgttatctatttgtttctgctatgacaacggtttccgcggcgatcttcctttatagcccagacactattttagccgcggttgcggtattaaatatggatgatgcgggcaatattggtggcgcggcagctatgtcgacattgattttaaccacctcggcaggagtttcgatattgttatctattgcttcgcaaggtgttcttcgccgtacacaagcgtggcatcagcgtgaagctaaacaataaatttaaaggtttaattctctcacatagcaatactaggaaaatcgcatgatgttaaaaaaactgatacttgccaccagcttattattctctgcgggaacggtctttgcagcgactgaaattacggtatacaccgcaatagaaagtgaacaattacaagcttataaacaagcatttgaggctaaatatcctgatataaaaataaaatgggtaagagattcaacggggattatcaccgctaaattattagcagaaaaagatcgtcctcaagccgatgttgtgtggggattagctgcatcaagtttagcaatattaaaagcgcaaaatatgcttgagccttatgctccggcgcagttagatgatattgatgtgaaatttcgtgatagcaacaacccgccaacttgggttggtatggatgtctgggcggcaacgatttgctacaacacgatagaagcacaaaaattggggttatctaaacccacttcttggcaagatctcactaagcctgaatacaaaggcaaaatcgttatgccaaatccggcatcatcaggcactggatttttagatgtaagtgcttggttacaaatatttggtgaacaagagggttgggcatatatggacaagttgcatcagaatattggtcaatatgttcattctggctccaaaccctgcaaaatggctgcatcgggggaatacccgataggcatatcctttgaatatccggcgatccaattgaaacgacaaggggcaccactagacatcatattaccgcaagaaggattgggttgggatattgaagcaacggcgataatcaaaggaactaataagcgagatgccgcgcaaaaattagctgatttttccgcctcaaaggaagcgatgaagctttatagtgctaattttgctgtattagccaataccagtgtacccgtaagccaaacagaattacctcgcgattatgctcaacgtttaattaaaaatgattttatttgggcagctgaaaagcgcgacaccattttaactgaatggcgtaagcgctatgacggtaagagtgcaaaataattattttttactttattaattaatagatagggtgcgatgcactctatctggtttagggtgtcatatgaaatttgatattgcggttattggtgcgggcattattggtttatctcatgcatatgcagcggctcagcgaggtttacgtgttgctatttttgagcgcagttacacgcctgtgggcgcttctgtacgtaattttggtcacggattaattttgggtcaagcgccgggaaaaatgctagatttagcaaaaaatagtcgtgaaatttgggcaactatggccaaacaggctaaatttttaacgcgtcaaaaagggacttatctattagcacgtacacaatctgagcaagctgttcttgaagcctttgtcgatggtcgagctaaaacctatggctatgattgtgaattactttctaaaacacaattagcgacggtttatggtggtcaattacaacaccataaagcggcgttgcatggcaaagaagatcaggtgctattttcgcgagaagcgatcccacagttagcggcttatctaggcagcttagctaatgtaacgagttatttttccacattagtacgggatattgatgtagatacggggacattgatcaccagtaatggaacatttagtgcagaaaagatcattgtctgctcagggcacgattatcaaacattattggctgacgaaataaaaaagcttgatcctatagtttgccgcctgcagatgttgcgagtgacagcagagcaaaatattggattggcgcatgcgctaatgacgggattaagttgtactcactatggtgcatttgctgatttacctgaggcacaggctttagcgaaagaaattaaaatgcaatcgccgttgattgagcagtatggtattcatttattaattaccccgactccttatggcgatcttattattggtgattctcatgaatatagcttagatgcacagccttttaacagcgaagaggttgataacctcctgatagagttagctgagcacacattaggttgttcggttcaagtaaaagagcgttggcaaggggtttatggggcaaaaggaaaggagccgatttcaattttaacgccgagtgaaaaagtcactgcagtattgatgcgaacgggtttaggaatgagtgttgggcctggtttaggtgaacaaaatattcgtcaactatttgattaatcttgcattagggatgtgaagttattttttaattatccaaagcaccgtaaaaccccgtccttcaggtcggggatataaggcgcggttttttaactaactcggtgtttcctgttgctcaatgtactggcggataatggatattggtgcgccaccacaactccccgcgaaataacttggcgaccaaagaacccccttgtagtaatcacgttgggcaatatcaggacgatcacgtcgaagtaatcgactcgatacccctttaaggctgttaaccagattagatatcgccagttttggcgggtaattaatcagtaaatgaacgtgatcccgttccccatccatttcaaccagttcaacatcaaaatcagcacaaacactggcaaagtagcctcgcaatttttcaattgcatcctgatcaaatatttttcgccggtattttgtgacaaagaccaaatggacgtgcatcaggaatacacaatgtctgccacggcgaatattagtttcatttttcatggaccaaagtataataggtaatatgaaacgtctacaagcctttaaattccagttaagacccaatggtcagcaagagcgtgagatgagacgctttgcaggggcttgtcgttttgttttcaatcgggcattagcacgtcagaatgagaattacgaagcagggaataaatacattccctatacaaaaatggcttcatggctcattgagtggaaatctgacacagagacacaatggttgaaggaagccccatcacaaccgttacaacagtcacttaaagatttggaacgggcttacaagaattttttccagaaacgtaccgcttttcctcgattcaagaaacgcggtaaaaatgacgcttttcgctacccgcagggcgtgaagctcgatcaatccaatagtcgtatatcattgccaaagttgggatggatgcgctaccgcaacagtcgtgaagtcgtcggagaagtgagaaacgtcacggtcagtcagtcatgcggtaaatggtacgtcagcattcagactgagtatgaagcgacagaaccacaacatgaatcaacctcaatagtcgggcttgatgcaggcgttacaaagctggccacgctttcagacggtacggtatacccgcccgtcagcagttttaaagtaaaccagcgaaagctggcaaggcttcaacggaaattaagccgtaaaatcacattcagtgccaacgggcaaaaacaaaagcgcaaaattcaacgtctgcatactcatattgccaatatcaggaaagactaccttcacaaagtcaccagcgaaatcagcaaaaaccacgcaatgattgtcattgaggacttaaaggtcagtaacatgtctaaatcggcaaaaggtacgacagaacggcctggacggaacgtaaaatctaaatctggtttaaaccgcgcaatactggagcagggctggtatgaaatgcgccgtcagcttgagtacaagcagctctggcgaggtggtcaggtactggcaataccaccagcctacaccagtcagaagtgcgcttgctgtggtcatacagcaaaggaaaaccgccagtcacaaagtcaattcgagtgccttgaatgtggatatacagcgaatgctgatatcaacggggcacgtaacattttagcggcaggacatgccgtgcttgcccgtggagggagggtgcagtgagaccgcccgtcgaagcaggaacccgccgaggtgattcagacatcagtctgaacgcagtagggatccacgtcctttagggcgtggaggatgtcaaaatattcaggttacgaagagagaataaaaaagagatgtctattttttacacatctcttttgcaataacatattcatttggtgcaaaagcagatgatttataacaactaaaatagcctttagaggttaaatcgagagcgacataaattgaaaagaaaaagctaaaaacgataccaactattgctattcctgtgcatatacccgctactttattattcattttttgtgttttttttgtgtatccacaaataaaaattagataagaaaaatagataatcaaaggggctgcaaaaaaaaacaaccctgtttgaaatgagaatagaattctatctttcatcataaaatagtttttgtagtagattatggagtcatagaaacaaaacaaagctaaagaaaaaaggaatattgcaattaaatacatttttagagagtttattttaaccatgactaaagtttccctacttttcagtttttagcaaaaattaaaacgtaaataaaatgaccatatgatatatataatagtgattgtaacataaccccatcttagctttttatttttttctaaaaaaagtaatgtaatacaaggtattaatatcaatataggctcagtagcatatctgacaatgaaaactattagtacacattatcagatttaagagatgtctattttttacacatctcttttgcaataacatattcatttggtgcaaaagcagatgatttataacaacgataatagcctttagaggttaaatcgagaccgacataaattgaaaagaaaaagctaaaaacgataccaattattgctattcctgcgcatataccagctactttattattcattctttgtaacttttttggtatcctaaaataaaactataatatgagaaataaagtattagaggcgttgcaaaaactaagagccctgtttgaaatgagaataagatcctatcttccattagaaaataggttatgtagtaacttgttgatatataaattgaaaaaatggctataaatagaattgcaatagaagataatatcaattttactggttctatttttatcaaaactaaatttctcccattgagaaagatggcgttgggggatagggaaggtcagttttcagaagaaattaaaacgtaaataaaatgaccatatgatatacataacagtgattgtaacataaccccatcttagctttttatttttttctaaaaaaagtaataaaatacaaggtattaatatcaatataggctcaataacatatctaccattgagtggcagttgacaaagattatcaatatcaccttcaccaatcatccattcatagtcagatatggaaagaatattaatcaatattaataaaaaaataaaatatagaaatataaaagtgcgaagtattattttcatattaaagaatacctagatatatctttatattctctattgaccaattacgcccattactgctttattgggcgttggtattggataatagttacggcttttgattattagcgatcctctgattaatatcttctatcaccgcaggtaaattggcaagggtatcaataatataatgagcaccagcggtacgtagtttattttcagcaatgcgcttacggttttctatttctgcctgttccattgtttgatattgttcaaaggtggcaccaaactcattgcctgaaacagataacccgacagtccacataccggcatttaacccttcggcaatacctgttactgcatcatcgactttaacacagtgtgctacactcattacacccagttcaatcacattctttaacgccatccaagggcctgggcgagagccggcggcaatttcatcactagcaaccacgcaatcaggctgataaccatattcagcggctttcggtactaatacatccattacggctttaggataacctgagcaagagccgattttaattccttgtgctcttatggtcgagatagcctcaagtgctccctcaatcggtttagcaaaatgtaccacttgtgcaatttgtaacggcataaaggtgcgataaatatgctgtgcctcttcttcacttggtgggtgaccaaattgggctgtccagcgagtacgaatattaggctcgttaagtaaagcacgaatatgatcgattttacccatccccatcggccctcgtgcttctgataaacttattttaaagttaaaggcttgagcaaaggcatcgacaaaaatttgtgtgggggcgaaagagccaaaatcgactactgtaccagcccaatctaaaattactgcttcaaccgatttattcatatgtttagacctactatgtgaaatcattattaacggcgaatggggagaatgtagaacatcctaccattaaaaaaatgggttattgtgatgtcaattttaagggggatttatgacataggtatgtcatcacaataaatatcaccgcaaaagtagtttggctctcaacattagatactaaaaaaagtaaataaaactaatataaaacacgattttaagatcatcatttaacgcataaaaaaaagagtgattttatttattaatcaataaattttattagataagataaaataccttttattatcatacatattttatattgtatgataaatttattaccgaattttattgtattgttctttcatcaaataaaattgaaaataaatgtttttattttaataatagagcgatttttcttaatccagtgtgttaaaaaattattttattggttttattgtttgtttgataaaaaataatttggttttattttgtttttttaggttttatcaaaaaataaaataaatctatttaaaataatgctctctaaaaacaagataaaatagtaaaaagtattttatcttaaacctcttttctatttttcaatgttcttattagctttagattattttatctatttctatcatgtgatttctagcagatcttattctatttaattaattgttattatggttttaaaaaatagatgcaatcatattaaatatatgtaaagtttaacgtgatgttattgataaataaatccacattttattttaaggctaatgctttttatcaagcattttattgcagttgataaaggccatcttgatttaaatatctagctaaaaaagacaaattataattacaagaggtaaataaaatgcaacacacaattaattcacaatatgatgaaatggttgattttctaaaggagttagtgaatatcgatagcggctcttatgataaacaaggggttgatacagtcgctgatcttttaattcaacgctaccaaaaattaggttttgttgttgaagtatttgaaaatgaacaactagggaataactaccgtttagttcataaagatgccacaaacccacaaatttttattgctgcacatttagatactgtatttcctaaaggaacagtagcagagcgcccatttagtatcgatggctcccgtgcctatggccccggtgttattgatatgaaagccagccatgttttaacttactatgcgattaatgcactcaaacaaagtggcgatctctcttatcaaaatgttgaaatattacttaactgtgatgaagaaatagggtcaaaaacatcgcgtcatttaattgaaaaatatgcaaaaaataaagcttatgcattaattatggagcctgctcgtgcgaatggtgccattgttagcgctcgtcgaggtgttggaacttatgagttgttgattgaaggtaaagcatctcactcaggtattgcaccagaagcaggaattagtgctattcaagagctttcatacaaaattcaggccctacatgcgctttctcgccatgatgaaggtctttccgttaatgtcggactgatttctggtggtacatctgtcaatacggttgcaccccatgcacgagctgaaatcgatgtgcgtatttcaacggatgagcaggggattgaaattgataagcaagtcagagaagtttgtagtcaacctgtgttagcgggggttaaattaacgctaaaaggtggcattaatcgccctccaatggtgaaaacacctgaaagtgccaatttaatagaaatcattaaacagcaagcggatttaattggcttagctattgaagatatttcaaccgggggaggatctgatgcctcatttactgccggtgtcggtacgccaagtgttgatggtttaggccctattggtggctatcaacatagtgataaagaatatctcgatttaccgtcattgaccgaaaggacagtgctatttgcaaatgttattaagcgtctgtctcaataaggtgaatgtatggaaaagagtaaaaaaataaaatgggctatgcctgatgcctttattattatttttggtatcgttattttagcggccatcgccacctatttgatccccgcgggaagttatcagcgggaaaccgttaatggattaaaccgcgttgtccctaatagctttaattatgttgcacaaaatccagcttcattgatggatgtgttttatgcaatccctgtagggttaaaacaatctgccagtattattttcttgatctttatgattggtggcgcgattgccatttatgatcgcacccgtgctattgattcaggtattaatgcgcttattgttaaaaccaaaggtaattatcaagctcttattattacggttgcttttatttttggtatgttgtcatcccttgggcttgcggccaatgccgttattgcgtttatccctataggaatagccctttcgcgctcaatgaaacttgatgctattacgggggttgcagttgtttatttaggctattatgcaggtaatgcggttggtgtattagatccaactattttaggtactgcacaaacattagctgaagttcctcttttttctggtgttatttttcgagttgtattattcgctatcttaattgttgtcactattgcttatattgtctggtatgccagacgtattgcgaatgatccaacgaccagttatatgtatggaatagctaaagatgatcctgattatgaacagccacacactcaatcattagatagcaccttctcattgaggcaaaaattgagtttggtggtatttatagcgtttattggattgtttttatatggcgcttttgaatataaatgggggattgaacatctatcagccatttttattatgatgagcattgttgtggcggctatgtttaaaattgcccctaatgactatatcaaaacctttatgaaaggtgctcaatctttagtgtatggggcattggtggtggggatcgccagagcggttattgttattttagatgaaggacgagtgcttgattctattgtacaagccacattagtgccattacagcaaacctctcacttttggggcgctcaattactttatttctttaatttactgtttaacttgctagtcacatcaggaacgggacaagcatcgattgttatgcctattatggtgcctattctcgatattcttgatcttacacgtcaaaccggtgtccttattttaaaactcggtgatggctttaccaatattattaccccaacatcaggtgtacttatggcggtactggcggtaggtaaagtgccgtggacgcgttgggttaaatttgtattccctattttaatgatttgggtcgtgataggtatggctgcaattggtattgctaccgcaataagttatggaccagtgtagctttgtactaacggattattaacgataaataggttattaagtataaataaagtgccgtttgtttagttacaaacggcctttttaaaccaacctcatggtgtcttcagttggtgttcaaaccctgtgactagttgctctaagccaaaattaaaacgcatagcaaaatcatcagcaaaaagaatttctcttacttgccaagtttgagggtatttatcacgtacaatttgttcaaaagcgagtcgtttttgcattaaaatttcactatcaataagcgtgatagcttgctgttcaatgcaacaccctaaaataaaatagagtaaggtcatcgacatattgcttgctaactcagcagatgcaccagactgcataattaaagtaataagcgtattgtttatacgtaacacattctcagaaatcacataggttccggcaaaaactctagcaccatcacgatgttgtaaaaaagcttctcttagttctgttgctagacgttttagatcagctttccaatcttggctatagtgaaaatcaacagcgacttcactgactatacgatctgccattccctcaataagcgtttgtttattatcaaaatgccagtagagagaggcggcttttatatgtaatgcatctgccagttttcgcattgttaagccttcaatcccttctttttccagcaaagaaagcgccgtatctaacacatttaatcgatcaattttagggcttttcataaataattctcattttcctcttttctatctaacaacgttagtttaacataattatcaaacctaacaatgttagattaaagcgaaagttaaatatcactaagcttcgcttaggagtagaaagatggaaaatattcaatcaaaaaaagaaaaaatcatgcagttagtgatggtttatacaccttggatcactgtgatatgtgttgttgcgtttattggtatagcgactgcagattgggatcgctggtggagtgatgctcgttatcaaacaacagataacgcttacataaaagcggactcaacgatattgaaatcacgaatgactgggtttatttctcagattaataaagaggattaccaagtagtaaaacgtggtgaggtcattgctgaaattaataagaaagaacaaatattaaatcggcaagcggcattagcagagtatcaaaaagcccaattagctttagataatctcactgaagaaattaaagaatatcaattaaatattgagaaattagctaatcgttatcaagcatcagttattgatgttacccaagctaagcgcagtccaatgttgcgtaaagatttaattaatagtggggctatcacacaacaaaattatttagatgctcaatctgatttgcaacgtttaatgaaattacaaagtgctgcgaaaaatgagtgggatcaggctaaacaagcactggtattactaaaatctcaagaaaaaatacgtctggcacaaaaagatatcgctcaaacacagtatcagcaggctgaaacggagctttcatacgcgactattaaggctcctttcgatgcgcaattaaataaaataaaagtcaatatcggtagccttgtgactgcgggtagcgaaattgtgactttaacaccgattaacgatgtatacattattgccaatttaaaagagacacaaataaaaaaagtacagccagaacaatctgttgctatcaaagttgatgcttttcctaccgatgttttttcaggaaaagtgagatatatcggcgcacaaagtagtggtgaatcagcacttattcctgctgataatgccagtggtaattttactaaagtagtacaacgtattccggtttatatcacgctcaatagtgataaccgacacttagctaaattaagagcgggtatgtctgtgcaagtgaaaattgacacagatagccttcctatagaggagggggagcgcagtgattaaattattatcagcagcacaaaatcatcgtcctatttttgttgttatggctgtttttaccggggctattttatcaacactctttgtacgtatgttttctatctcgttagcggatttaagaggcgtgtttggtttagatgttgcccaaggatcttggttgaatgtggctcttaatatagctcaattgatcagtatgactcttgtaccttggtttatggtggtttatggcgcagaaaaaatattaatcagtgcgagttttatccttttttgttgtggattagcggttcccataataggacaacagattggttttggcggactttttattgctcattttatgattggattttgtatcggagtctatttgccgatgacgatttcattagccttaaaaagtttaaatcccagtgtttggctaatcgttatggcggcttatagcttacgtgtttctgtaggaatggatgcgggagtggggatctcaggagaatttgttgacatattgaattggcgttggatttattggttatccgctattttcaccttagtcatcctattttttacctggtggggaatgccactctcacctattaataaatcattgctcgctcaaagtgattggggaggaatggcgcttaaatgcttaggattaacgctattatatattggtgtcgttcaaggtgaattgttaggttggtgggattctgggctggtcgtgtcttgcttaatcggtagcgctatactgatggggacatttattattagagcttatatttataaacaaagctttggccacttaaattggatcaaagatagtaatttacggctctgctttattattgcctgtttatatggctttttgatgttacctaattcgttatttataccttcatttttgagtgttgttggtgggttgaaaccactacaaataggtcaagttaccaatcttgccttctttatctatctattatgtagtccaatagctatttttcttgcacggcgtttagagccacgattaatgatgttaataggtattatgattattggaggagcatgtttaatcggtcatcaaattgattatcagtggcgagctaatgatttctttattgtcatatctatgcaagcaatgggggaatgtttgctacttatcggattaattgcctcatttgttactaatatcaagccacaagaagcgttacatttaggggcatatatttcgatagcgagagtattaatgccagcccttgcaggagctattatcaatacttatttgaggatctcatatgatactcattatgatttgttaagaggatacatacaaactggtgagcaaaaattagcagggaatattgctgaacattatcaaacaacgatggcattagtaataagagaagcacatgttgcctcttttattgatggttttgatttgattatgctcttggttattttaggtgctctttgtatgtcatttttaaaatcgtcaccagaaaatccggtagtcccaaggctagtaaaataaaaaactgcctgttttagtacaggcagaaaataaaataagaataatataataggagagaaatattcttgttacatcaatatgatgagtgtaaaaattaattgtatgatttaaatagtgattgattacctgctttatcaaaagcaatgacttgataaggttctttatagtcccctgcatacatacctaagctacccgctggcatacctgcaacagcaatgcctgtttgctttttatccattaagtctatattttttaagctatcgataggaatatgtccgactaagtctttgccttggtatgttgcatagtgacagcttaataaattatcagggactgctgcttgctgatatttttgcattaattctgtttcagagacaatattgacattaacatcaaagcccgcttcttttacaccatcagcccacaaattacagcaaccacaattttcggttttataaacttcaactacagcatgatttgccgcttgtacagtaccactaaccgttgacaatactaagagagagggaaaaagtaattttttcatcatgtattccttatagatacgaatacagagaacaataatctttccccctacaggaaggtcaattcaaataaagtataagcgtgtagatttttgtaaaaataaatatgtagggttaataatataaatgtctacataaataaaaaagccttgatataacatatcaaggctttatatattaattattttaattattaactttcattttaatatcacctgctaatttaaatccataacgacttaaaggtgatatttgtatttctgttaacttttcttttacatcaactttaatttcttcttgaggacgaatataaaattgaccaatactataaccgttattgcttggtaaagagctaaaagcgggagccatacgaataacttgtttaccattattctttaatattaattgattattgacttgttttacttctagatttttccaaggttcacgctctatggttaacccttttggaataattaacatcgcaatatcttgtctgataggcatttttgttgaattgacctttgcaacaccaataccttggaaagaggcttttaaaatttgttcatcatcaaattcaataccgtcttttaaaataaaattaatattctgactttgatctggctctattcttgtaataggtggagttataataatattttttgctatttcgtgttgtttatctaaatcgctgacttttgttgataataaaataggttcactacccgtatttttaacattaaaaatctttcttggctcttctgaatctaaaataacagtcatggtttccaattgaaaactagcatgagaaaaatgacttattaatagaatgagaaaaatcattccttttagtattttcataattagactatcctctttgtattacttacaaattgcatcaactttttcatataaaaagtctggattaaattcttctggaactgaataatcaacagaacagatgtcaccattatctgattttacttttagtggcttaccgatttgctcattacttattataacattaccgtcccccataataacacctattagatttcccttatcatcaataacactatttgctgtattaacaggtttaccatctggtttttttatttctaataaaacttgcttcattgtattgacagggatctcacgagaaaaaacagtaccttttgccaatgcaatatcaaaggatgttgtgcctaacataacattgagtggtaaatttttagtatttaatagaacagttgtttttttatttacaggtaagttaggaataacggcggtaccaaagtgattagttattgtcgtaccaccacccatagagttaactaaaataccagattgtcctggaacacgtaaaataccgaaagtatctcctaactccacaggagaagtagcaaataatccatcactataagcaatagcaccagatgctgtcagcatcgccgatttttgattactattactaaaggagcctgtcgcactaatttggctgtaagcggttgttgcattgatattaccgctaatattcttatctttactgtctttatcagcagttgccccgatagaatatctaaataaatcattatgataattactataatttgttgttaaagatgatgttttataatgttggtattgagtactaaatgatgatgaattattaataggtacgttgatgtttacaaatgtacgatcttcaaaattactacttttttgatagctaatattaaaagacataaatggaaatctttttccataagaaatggtatttgaataattgtcttttttatcaccataatattggctatagctaaggctataactcagtgatccataacgttgatttcctaagcttagagataatgagcttgatgtttttgtctgattattagcaagattatcatctaatgggtcttctatattatctatttgtagagattcatagagtgtcgaatagttacgtgaacgatatattgttgataagcctagtgagaatactgatacaggtaaacttaaattagcatttgcttggaagccatcacctttattagaagaagatgcatatttaataccaaagccagtagataaaggacgatgttcaccaaaaacgctatttacgctacctacaatggacttatattttgatgatatttccataccccctagaaaattatgatttaaataattaatgccaccttcaaaaccggtaataaaaggagtatgtatgcgttcatcacttgagttttttctatatttccccataaaaaagttaaagctggtactactctgtggattttttaagtctttatttgatgtaataacatcaaattcttgaatagtaccatcatcttgaataactttgacatgtaatggttgacttgatgatacaccactaatgttatttaattggaaagggcctgcaggtattatcgttctatataacaatcgattattttgtgtgacttcaacggtagccggtttttcagacatcccagtaataggaactgtcaacttactgttttgatagctactatctgaatataattgaaaaccattcacatcagcactatctaataactcactattagatgtaatttggcctaattgtaaaatggctttgatgcgttctattgtacgtgaaagcgttgtttcattaaatctatagtaagttttcccatcacctgaagaaaagctactgttattacgtaaaatccaattataaaaatttatacctgttttaaaatcaccttgataaaaattcctattattagagccatttaacttcataccatagattctatagttgttgaatacccctaagccaccataggttaattcattaccataggcactttgatcgaagtaatcatcattaatagtgatatcaatagagttgttatttgggtgataggtaatatctgatttaggatatatctctaaaaaatcagcacaatctgaatttatctctttttttttaatttcagcttatctattaattgattatttaagcaaagattacctgattcattaataagaatattatcagaatagttaaggctactatttactataattgttacatcatgataaccaggaagaaaatgacttccttctttaaaataatcagcgatttcactgccataaccaagagatttaagtgagtcaatatcaaactcgatatttttattatcagctaatgctaaattattgttaattagataagctaataataaaaatatcattttacgatatcgaaaatgcataatgaaccccatagtaaaacgtcgcgtttttaaattttaagatccaaatgaaaaatcgaataatagagagcctgaaagttctccaccatcgacaagagggccatttgtttcttttaaactataaattgttggtgaaatttttaactttaattgatagttattccctttcgaaggtgttacaccatcttgactaaatccgtttagagtgcctatttttaattgtgggcttgtttttattattccaatattattttcgttatctgtttcataaatattaacatcaataccatctactgtggctttttcaacagatacctgaaaaaaaccaatcttacctgttgtatttatagtgccaaggccaaaatgagtttgatcattatctgtggttgttcccattttttcatctgcttttattgaaaatagtacaggtgaaacaggtgaaggacagcttatatttattaatgtataacgatcatctaacttattattttcattagatttaaacatataagctttaagattatgatactctatggttatatctttttgtgacacaaaacaatcatcattaaatgatggtgctagatcgttataaatatctgcaaaagcagatgttgatactaatgaaatacttaaaaatggtaaggtaaaataaaaagattttataatattcataataacctaaagccagctagtgtagtttctttttctgatgtatttaactaattcgacctttataataatttttaattaattatacgcttatagaaaataaaaaacagtcttgtaatttaattggtgattttaaaatgggtttttatattctatatcaaatcggctactctaaaatatatagtctatataagataattaataaaagactttctatatctgataatttataaaaatatttaaataaaaacgtaagaaacccaaatgatttcttacgttttttttaattaaattccgaattggaatgttaatgtggctaaaccatctaacttagcatcaccatcactattttttagtgcgctattgatggttggtgtgacttcaaaatctgccgcaaatacttgaccgtcagcataatcattagcattactacgagcccaacctaatgaatcattttttactagtgtcttagaagtagatctgccatatctagaatccattacatagactttcttttcttcactagtcaaatcttcttttactgtggcatttttcattgaaactgtgtagtaacctactttagtatcaacagcctcttttccatcgactgccatcttataactgcctaaaccaaaataagaatcaccttcttttttttctgtcccagctctattatcagtaggagtaaaagctagataagtttttgcatcacaagttacgacaatattttttgattgaggctctaatgttaaatcaccttttgcagggaaaaggccaggagttacagcaaaagtatattcaacagtagtttcacttgtttcgccattgatggtacaagttggtggttggatatccccacttacttttaatttagcggttggtgtcgcagcgaaagcgatactacttgataaagtaagtaaagaaatagctaataagctttttttgaacatatatcctccatgagcgatataaaactatcttaaaaagattatttataacctctcatatcgtttgattttaaataataaaaatctcaagtttttagagtgactcaaagtatataaaaatcatctaaataagattgcatttatatattatactcgtatatataaatattaacacccttggttaaatttttcgcattaataatttaacaaaagattaaatataatataatttatcagaaaatgattttctttatttgatggagtttctatattttatacctaaaatataggtttttttcttgatggtttttttttgatattatcgagaaggttgtttttgtggaaaataagaatgtaagaaattagtttaatttcttacattctattttaaattaatttagattaatttaattaaattagataccaaattggaaagcaagagttgctaaaccatctaatttaggttcacctccgctattttttagttcactattgatagttggtttgatttcgaaatcagctgcaaatacttcaccggcagagaaatcgctagagcttttagcccacgcaaacactttttctttttgaagactttgagaactgtttacagcaccattgtagaatacagaaactttagcttcttctgcatcagcagttggttttactgtcgcatttttcatggtaataccatagaaacctactttagtatctacagcttcaccctctttgtttgtttcgtggtgtgtacctaaaccaaagttagccgcatttgcttctaattctgaacctgctctatcatctgtaggaacaaaagctaaataggttctagcatcacaagtaacagtaatgttgtgtgaaattggttctaatgttagattaccttttgctgggaaaaggcctgggctaacatcgaatttatattcaacagtagtctcacttgtttccccattaactgtacaagtaggggcttgaatagtaccgataacttttagtttagcagtaggtgtagcagcaaaggcaacactacttgttagagcaagtaaagaaacagctaataaactttttttaaacatacatcctccagtggaagtatatatatatcttaattcgatacatatatacctttttaatgcactttattttttcaaaaataataaaatgctctcaagtttttaagttgcttatttatattattatcttaataagaataccttacaaataattatacgctgataaaaaataaaaaatagtatttataattaaataaactttaaatgcataaaaaagataagaattaaatattttaatcttaataagatagtcattaaatgttatttaaatcaaaataagataattaataaattactttctttgtttgagtatttaaatacgagtcttattataatgaatgaaaaaacatataataaaaagtgtaaggtaattgttaaataccttacactttattaatattaaataccaaattgaaatgtcaaagtggctaagccatctaattcagcttcgccttcgatttttttcatttggctattaatgacgggtttgacttcaaagtcagcagcaaaagattttcctgcaacagatgtcttaccaggcaaagcccaaccatactcactttgtttatgaattaatgtattaggaactgatgtcgtggcgttgttagatttgatataagctttttcaaacttactaccatcttcttttttgacagtggcattgctgatattgatggtgtaatagcctacttttgtttctgcattttttccatcatctttatttttaaattgatagtgacctaaaccaaagaaggcttcactttcttggctctgtgttcctaatctattatctgttgcaacaaaagctaaataagtacttgaatcacaagaaataacaatgttttttgattgacctgctaactttaagtcacccttttcagggaaaagacctggagtgatatcaaagttgtagataattgtggcttcttgctcttcattattgatagtacaagtcggaggcttgatccttcctgtgacttttaatttagcaatagggttagctgctaaagtagtaccgctggataatgctaataaagaaattgctaataaatattttttaaacatacatcctcctatggcggtatagtaatttatcaaattatagccgtcattttttgatgcgttttgtttttttataaaaaatatttaataattacgtaatttaagtattttttcttacttaaaataaaaacaatcaaaaaagcttttgtgacaaagctaacaataaaacggtggcgctatattgttcataatccgatgataaattgatggaggaagcatcaatggataaggataaaagaagggaataaataaaaagacacataatgttttaatctttatatgtctttttaaagagtatagttatttaacaatgctcagttgttttacatcgatttcagtacttgtccactctttatcgatcttaccttcaatttttacggtattctcaggcgtaacggtttgaccacgccatcttttttggtctatttcaacattaatagcacctgttgtgtcttcaaaaacataaagctcatcaccaatttttttggtgattttgcctgttaagataacccaagtatcatctgaaagtgtttttgctttagcaacggtggtttcgctaattgaaggacctttaaatccaccttgctctgtggtggtgatagcgctttgtggggcaacaaaaccaccgctattttgttggtttgaattggcttgagatgcaaaagccaatgtactaccaattaataaaactagtatttttttcataataggctcgcttattggtttaaacattcacttagagatagattaattctagttcaattcttcctataaaaatgcatattaaagtaaatattggtattaatatatcaattttatcaacttgttattgataaatgatggtgtaattatttcattttattatttctactacacggcttttccgacgaatgatttttcttgcacaccaagcataaagcaacccagagataacgcccgcgatatgtgattctgtagaaaaccctaattgcccggggattaatccataagccatagagccgtaataaaacagcacaaataaggcgatgacgatatcgataattttatggcgagtaaaagcatgggcaattagcagtgaccataatccaaagatccacccacttgcaccgacatgaatagcgttacgcccaaataaccaaactaataacccactgatgataatgataaaaatacttgaatagcaatattctcgtaatgactgtgtcatcaataaaaagctaagtataagaaaaggtaataaattactaaaaaggtgagaccatgagccatgaataaaaggtgaaataaagataccgaataaaccttcgctgcttcttggaataataccatattgaagaagatggacagggaagaggctccctataatttgtaataagaaaagaaggatagttaaaccaccgagaatataaattcttctttttagccagagacgatccataacgataagcctttattgtaggtgatgacctttatttatgaatctactgtaaagagaagagcctttctgttagatggctcttcttctattatattcagtctaataaatttaagcaggcagctcctcttgctccacccgcatcaccataacgtgctttttctattgttggaatttgtgtattaccgtatacacaatgtgagagataatccggtaataaggtatacagtgcgtcaaattgtgataaaccgccaccaataacaattaaatgtgggtcaagtacagtcagaatattactaaggtaaatggctaatactttcatatagcggtcaacatgctgttgggtctgttcatcgccttgataatattgtgcaacgatatccaccgctctttgtggtgagccattaaaggctttatacatacgttcaaaaccacgaccagataaataagtctcaaagcaggcttttctaccacaaccgcacaatatttttggcatggtctcaccaatcacattatcagcatctacattaagattcatgtgacctatttcaccggcaataccatttttaccagagagtactttgccatcaatgacaaaaccaccgccaacacccgtacctaatattaaacccagtactgaaggataatgacgaaattcaggatcccatgcttctgataaggcaaaacagttagcatcattctcaactttgacggggcgttcaagaatattagccagatcgtggatcatcggtttatatttggcagcaggcacgttggtggtaaatacagttccttcttttgcgttgacgatgccaggaacaccgatacctatttttcctttactgcctaaatcattatcagcttctaaagtgagtgttttaaaaacatttaatagagcttgataatcattctttggcgttggtacacgtttttgccatacttgagtcagatctttatcaaaaacggcgagctcgatttttgtgccacccatatcaaaaccataatacatatcagtctcttagttatcctgtaaatgtaatccgtagcttaattaaatagagaagaagctatggtgcttaatggtcataacttcagttaacgcgttttttctctgtctattacttccacagattataagatttatcactatttattaaagatagcatagaaacaatcgtagataagcgcattttgtgatcttgtcaggaggtgaaacgttttttctaaccccatttttaatagaaaaaactatcataaaatgactagtttttagattttaataaagaaaatatggattaatatgataggaatactcttaaaaggagtggttccgaaaatgttatcgttaacattatatctaaaatagatggttgttatttgatgtatttttattagtataaaaacgtagttaagtgctatttaatgatataaaaaaacaaaaatatacgtattaatacttgtatatagtaatagtatctacaaggtgtgcattatttattataaatcagtcagttaaagatttattgttattatagtgttaaagttaattaatgtattcgtatctagtatatttattctttttattaagtattattaacaatattatttaatacgtaaaatataatcttggttaattatcctgattttatggttaatgatagttgtttttcctattaataaacaataaagaatattgttattaaatcatctcttttaagttattttttttagattatcttaatgggtctgaataaataaagttattttctttttatagcatgacaatgtgttagctactctatgaaaaaaatacacttttcgcttataaaaatgtgtctttttttgatgatgatcaacacaaaaaaacaacatcgcattttgctttgtgagccatattttacatttaaaaaagatcagtagctgaaaaatttcatattacttttctcaatgttttttcttcttagaataaattatattacaaggtaataattacaggattttatttttataaaatttatacaatttgttattagttttattacgttattagatggggaattaacctgcttttttacgttaaaaagagactttttttttgtgtttttcattaacattgtattaagtaaaaatacacagttagataaaataaaatacaatttgagcgaaaaatagttattttgaaggcgttgtatttcctattaaaataattatacaattcaaattaaataatcattacttacaattagacagtgtcttttttattagatgaaatattttacaagtaaaattactctgcatgatttaggtttgtataaataaatgaaagttgtcctgcaactcttaggtgttagcttttaaataagcttattttaattgtttttgtatccttatcttggtgaggtttttaattgtttgacaaggtattaggtgcgattatttaagggttcatattatgtatgatgatatagataatttaaaaaataagtttcaggaagaggggtttacttttcaagatttctcttctcaaacgacaggtaatatagcctgtaatattagtaatagtgttataaatcaacaggataataaagactccctatcaggggataatgaagagttcttgaatatatctaaagttaaaaagagacaaaaacaaacagctaatatagcgacttctctttcttattcacaagatttagcctcggaagtaaaagaaaaaaatagagttaataagcaaagtaagtgtttgctagataatcagttatttgaaaaaaaaaccacagataagtgcctagtaaatgaaaagctctcattgcaaaagatatttttatttattgcatcagctaattaaacaagctcttaaatataaataatattgacttatgtcaatttatagctattggtattttctttttttaaaagaatttattggtctatcgtaccaagaatgaattttttcttaaaaaagaaaataatagcaatggcaaggtacggggttatgaataaattatttaaactattaataacagtttttttattaataacaatgttttcgcttattgttatgccaatgagtgctaaacaacaatatatatttggtataattaatattctgctgttatttattattggctctaaaaagtcaaaaaaacgattattaacaatgatttttttatcattgttaatgtctacacgttatctgtattggcgagcaacccacacacttaattttaatacctctattgaagggatattgggtacaggattatttttggctgagatctactcttggattattttagttttaggttatttccaaacagcttggccattaaatagaaaaatagcgccattaccaaaagatatctcgttatggccaacagtggatatttatgtacccacatataacgaaagtttagatgtggtacgtgatacggttttagctgcacaaggtattgattatccaaaagataaaatgaaagtttatcttttggatgatggtagccgtgaagagtttaagcaattcgccaatgatgttggtgtgacttatattgagcgtgaagagcacgatcacgctaaggcaggtaatctaaatcacgcaatggcattaactgatggtgagcttatttgcgtctttgattgtgaccatatctctacccgtatatttttacaggcaacggtgggttatttccttgaagatccaaaattagctttggtgcaaacaccacactatttctattcacccgatccttttgaacgtaatttaagtgccgccaaaaacggccctcacgaaggtgcacttttttatggccctgttcaacgaggtaatgataattggaatgcaaccttcttctgtggttcatgtgcggtaatgcgtcgtagcgccctagaagaaattggtggtattgcggttgagacagtcacagaagatgcccatacggcattaaaattacaacgtttaggttggaattcggcatttattgatattcctttagctgcaggtctagcaacagagcgtttagcattacatgttaatcaacgtattcgttgggctagaggaatgacacaaatctttcgtgttgataaccctatgttaggccgtggcttaacatttcctcagcggttatgttatctcaatgcgatgatgcattttcagtatgggttgcctcggattatctttttaaccgcacctttactgtttatgttattcaacctcaatattatcgcctcttctgccagtatgatttttgcctttgcattaccacatttaattatgtcggtgtatgtaaactcacgaaatattggtaaatatcgctattctttctggggagaaatctatgaaacagtgatggcatttagtttagtactgcctacattgctcagtttagtctcgcctaaattaggtaaatttaatgtcactgataaaggcgatttgcttgataaaagctatatggattatctaacggtacgccctttgattattactgcgctacttctagttatgggtatttcatgggtcatcattcgttatttattaaatgattttcaaggcatcgaccctttagtcattgtattgaatttggtttgggcaacttatagtttatttattgtgttggcatcgatcgcagtaggtaaagaaacacgccaaattcgtaaaaatacccgcattaaggcatcacttcctatcactttacattttgatgatggcgctgaattacaaactaccaccgaagatatttctatggggggagtgcgtattgcgattaataaaatagctgaattacgccagcgtactgttaatagcattacgttaatggtgcaacgtgatgttgttacgcttcctgtggaaatggtcagtttagaaaatagccagttacgtctcgcttttttaccaatggatttaaatctacgccgtaagttagtacgggtgatctttggtcgagcagatgcttgggttcatcaaacacaatatcaagacaaaccattaaaagagttaggtgctatcactggctgtatttttgagttgttctttggtcgtcgtcaaaaagtaaaagcaccggtaaaaagagcaaaaacctctctctctgtgcaatctattaatggggatgactaggtatgaaaaagaaactgacatcaatactaagtctgacggttattgccatggcgagtattcatttttgctatgcgacaacaggaatgctagagctagatggtgaagtattaccagagccaacatcttatactcatccgccactacaacccacagtaagtacgcaactatttgatgatgttgcactctccgaggcgcgtaatattgaagagcagttaacattagctcagatggggagtccatcaccaatagtattatccggtcgacgtttattatccggcgtgacatttcgtatggcaaatgatctgtttatcgatagtgcgacactcaccatgaaagtgaaagcttcatcgggattagtgcaagccgatcaaacgttacatttgatgctaaatggtcaacctatgggatttttgcctttagaagaaggtgagcaagaacatgagtatatgttagaaatccctgaaatgatgttgaccaatgtaaacaacttgagttttcgccttgccagtcgcgatgctttagatgaaaagcagtgtattcctcctttagctgatgagttaagtttggtgatttcgcccgattcatcattaaattatcgaggtcgttggattaatggcgggtatagcttggaacgactgcccctaccgttctttgatcctgacagaatgacagcgacctcattacctattgttttagccgataaaccagataatgggcaggtaacagctgccgctattgctgcttcttggtttggtagttttagtcatgatattaaacaaatagatttacctgtattaatgaatcaactacctgatagcgatggtgttttaattggttatgccggacagactattgcaggtattaccttaccatcaggaaaaaatgggcagctcacaatagtcgataaccctgttgatcccgtatttaaattattactgattagcggtgatgatgaaaaaacattacgtcaagctgcatgggcattaaatagtggcaaattaccaccaaatgaccaattaacggttgctgctcaacatattccggtacgtcaggattatgatgccccacgttggttaaataccaatcatcccgtaacattgggtgagatagctcatggtcgtgatgattttactcgccaaggaataaatcatgctcctaatcaattttcgtttcgtgtctcacccgatctcttttggtgggatggagatgcgctacctttagatctgcaatatgtttttcctcattcagataaaataaatagccgtcgctcttcgctaattgcatctttaaaccatcaatttattggtgcgttatatccttctcgttcagagccattaggaatattaaggcagtggttagggatggagagtgcacagcaaagtagtacgctttatttagatccacgacaaatctacagtcaaaatcaattagagttctattttgatttacatgagtatgatgatgcaccctgtattttaacggatggccaaggattgattagtcgtattgatccgcaatcaaccttacaatttaaaaatacgtggcactattccagaatgcctaatttagcctatttttcaggtgcatcgttcccatttagtcgccgggcagatttttctcaaaccacattattattgccagaaaaccccacaactgaagagctatatactttagttaatttaatggcgagatcgggctattcaaccggtacacctgtttcttatatttctgtttttcttggtgcgcaagccttagaaaaaaatcagttagcacaaaaagatatcttggcgattggagagttaggtagtaacggctttttgccaagtgctttttcacaaaaaaccttctcttttataaataaccagcttgagatccaatctccctcattgatagataaagctaaaagttggttagccggtgatccattatcaccaagtagtgatgcggcaaattatcttgctccgttaaatgattggcggggaatgatgagttttatctctccttgggctaaagatcgtgtggttgttttagtgactgcaaaaggtaatgactcaattaaaaacatcattggtgatttgaaccatgcaaatgtcaatgccgctattaaaggggatctgactttaattagtggtcaagatacggtgatgagcttccatttaggagaacatttttcacagggagacctgcctctattacagcaatttctttggtattgcaccagacatgtctatttgcttggcatgttggcagtcggtttttgtgcgctaacagggagcgtggtttattgctggttacaacgccgctcaacgcgtcgcctgagtgaaatatcaaagcgtcatgttgataaatagggggaataaaatgaaaaaacagacacttaatatgattgttaaagtgatttatgccagttgcttattaggcgttacccattccacgcttgctaatgcaacagatgcgaatattgtcagctcgttaatagagcaagcaaattactggcatggaaaagcgcatgatgaacgtgctattgaagcgctacaaaaagtgctgatcatggaaaataataatcaagatgcgctgtatttaatggctttttttactgcgcaacaaggaaatgaaaaacaagccagctattggcgtgaaaaactggcacggattgcacctcaagatccgcgtattgcgggattaaaaaatattcgctcatctcaatttagtgaacaacaattgggttacgcgagagaattagcccaaaaagggcaacatgaagaggcaataaaagcctatcagcgcttatttgtcacacatgaaccacctgattcgctatcacttgaatattatcaaactatggctggaataccggcaatgttgccacaagcgattgctgggttaaaacaacgtgctcagcgggtgccagataataaagaaacacaaaaagcattaggattaacattaacttataacgaagaaactcgtcgtgaagggattgctattttaagtaagatttctggtgatgaaacggcgaaaaatggattaagacaagccttactatggcttaatgtacgtcctgatgatgaagggctgtatcaatcttatctacaaactaatcctaacgataaagccattgcacagcactaccaaggagcaatacaaggtaatgcccgacaagcggggtatgaagcgttaaacacaggtaacctaaagcaagcaacaacttactttaaacaagcattaacggtcgatagtcaagatgcccaagcgttagcaggattaggttatgtcgctctacgttcaggtgatttggcaaccggacaaaagttattaaaccaagcctctcagtcagggggggaacaagggcaaaaatggaaacaacaagcagaggatgcgggtttttattctcaattacgagaagtgcaacgacaagctaagcaaggtaatactcagcaagcactggataaattatcacctttaacttactcatcgggtgaaaaaggattatcagcacatttattacaagcggatttattgcgcaaacaaggtaatttacctgctgcttatcagctattatctgaactatatcaacagcatagtcaaaatgaaaaagttatttccgcatattactacttgcttattcaacaaggaaaaaacagccaagctgagcagttagtagcaaaacaacccgcatctttacgacaaaaattaacggcaaatactgatccatcagaaagattacgtcgtgatgcgcaaaaggcgttagaaaatggtcatcgcactcaggcaagacaattattaactcaggcacaacgtaaaaacccgcaaaataattgggtataccttgatttagcccgtttaatgatagccgaaggtgataaaacgcaagcggatcagctcattttacaacttgaacgtcgtcaaacacgtgatgccaattatattgcagcgctcttttatgttgaacaaaaacagtgggataaagtttttaccctactgaacaatcaacctcaacaaactgaggcggaaaaagcgttattagagagagcgcgtttttatcgtcaactgacacaagctgagcgttactataaaacgggcaatctcgttgcgatgcgcaatacgctgcgccctttaatcaaccaagtggctgattatccaaatgatgtaggggaattagctgaaaaactggtaaatagtggtgcacaagatgaagcactgcacttgattgaaaatgatctggctaaagggactaaaggctctgtgggaaattatgcagggcatatcaatgtgtttaatgcgttaggacgttatgcacaagcctcgagcttgattaatgatcccgcattacagcaacaaacgccagcagccgagaaacaacgtttagctatactgacaaatgttgcgcaagcggatagtttacgggaaaaaggtgaaatcaaagccgcttatcaaactctcgtcacctcattaaaggtaagtcctgatgatccagacttattaatggcattaagtcgtgtgtatttagcgcaatctatgccagagcagtcaaataaaattctctcttaccttgaaaaacagcaagggagagatagcaaattacttcaagcacaaattgaagttgctttggcgcaaaaagacggtcgtaaagccaaaacactgttacaacaaataccgacatcttcacaacctgcttatctattacaagcagcacaagtagcgcaattaaacggtgaaaatcgtcaggcattggcgttattgcgtagcgcacaatggcaaacgacaaataacacaacaggtacggtgaataccgcagcagggcagttaatggcactagagagtgaaaatagtgtgatgactggctctataaatgaagataaacagatggttgctgttcaacgctccattcgtcaattagagcagcagatatctccttgggtacaaggtggtattgctattcgtcatcgtaatggtgataagggattatcaaatttgactgaaatatcggcaccgattgctatctcaagtgttcctggtgaagattggcgctggcaatttaatattaatcccgtttcaatcaccagcggtacggcttctggagagcgcgctaatcgctttggctcggggcaattgcagcatgctgaacgttttgcgaaaaacagtgataatcatgatgaaaaaaacaaaataaacgcagatgatgcgggaagccagcgggcttcaggtgttgaattaggattgattttatctgatcacaatacacgttttgatgttggaacaacacctttgaataaagatagttccactattgttggtggactgacttactcaccaaaaattggccaaaatggacagttaacattaaccgcagagcgtagagcgattaaagatagcttactttcctatatgggacgtaccgatcctataacgggagaaacctggggacaggtcacgcgtaatggtgctaaagcgcaatatgcatgggatgatggcaaagtcggtgcttatattggtgggggatactataactaccaagggaaaagtgttgaaagtaatgaagaggtaaaagtttggcttggctcttatgcaaacttctacaaagatgagcaacaagaagtcaaagcaggtgttcatgtggactatatgaactttaaaaacaaccaaaattacttctcattagggcatggggggtacttcagcccacaagattatgtcgctgtctctttgcctgttgcttatacccgtcgttttgaaaaaggagaggtatcgctaaatggtgcgataggggtacagagttacaagcaaaaggggagtgattattttccaacccatgcttatatgcaaaatgcgttaaacaaacgtcatacgagtgactcacgtattaaatctcgttatgaagagcaagatgaaaccaatattacctatcgtttagggctcgatgctaaatattatttaaataaagagtcagaattagggctcagcttatctcatgatacatcgggtgattatgctgaagataatatgtggttatatctaaaatacaccccagactttttatctaaataattaaggagataagtaatgaaccaacatgatagcgatatattacagttaccttttgaaagcggttggcaagatctgacacaactattattttttcaaatagttagtgataacgatattacgcaggccgaaaataaattaagagatatcgggaaagatatcgctcaacgttacccattacctgatagcgaaaatatccagtcattagaatcacatatcaatcaagttttaacactgtttaagtggggctttgtgactatctctccagcaatgagtgagttgctattagtgcactgtgcatggccacatttttcagcaaatgaagaggaagctaattggcgtgcagcgagtgccagtgtattagaagggctatatgaaggctggcttactcatcaagggggaaatgataaaatgcatgtgcaccgtcaagctacagatgcaaaagatgcctttatttttcgttatgcgaatagttcatcagataaataataaaaactatgctttattgataagcataggaggaaaaaatgagtgaattagtaattaataataatattgttaatgacttattaataaagcaatttactaattatgtatttatgatgatagtaacagatataaaaggtaatattatctacgctaataaaaaatactgccaatttaatcatattaattttgaaagtataaaaaataaaagatataacttgttttatttagttgatgaaaatcaagatgtgttttctaacattagtgataataaagaggtaataagattagaggcaaaaaacccaaataaaaataaacaagaagtatgggaagatattaatatcgttccaatttttgataaaaataatctaatttctcattatgcatttttaagtttagatatcacggataaagtaaagttaagaaatgatttattaaataaaagctatattgactctttaactggaatggctaaccgtctaagtattattgagaaaattgaacaggagcgattaaatattgcgacaccttcatctttttgtcttgggattattgattgtgataaattcaaaacgattaatgatcaatatggccatgctattggtgatcatgttttatgtgagatagcgcagcgtttattagccttagaacgccagcaggtttactgtggacgacttggtggcgatgaatttgcggtacttttccctgctggattacgttcttgctctttattgttattggagatcatcgaatcgctatggcgaggaatggaaaaaccgataaaaatcaataaagaaaaaacaattgttccttctattagcttaggtattgctgaataccctaaggatggcaagacattatctgaactattaaagtcagcagataaacagctttatgcaataaaagagaaaggaggaaataaatacggtttttattcagagtattaaataacactatatttcaaataaaagtcattattaataaataaaaatctccttatctggagagggatacttatattttaaatagagagttttttagaaaagaaaataaaagaaattattttcaattaataacaatgtattgtttttatataaataattatttgaggagtatattatgatgaaagctgttattcctgtcgctggattaggcacacgtatgttacctgcaactaaatccattccaaaagaaatgttaccgatagttgatcgtcctttaattcaatatattgttgaagagtgtgcacaagcgggtgttgaagaaattattttagtgacacattcatctaaaaattcaattgctgatcattttgataccagctttgaattagagaatatgttagagcaacgaataaaaaataaattattaaaagaagttcgctctatttgtcctgaaaatgtaaaaattattcaaattcgccaagggcaagcattaggattagggcatgccatttgttgtgctcaccctgtcattggtgataatccttttattgtgttactccccgatgtgctattaaattctcactactgtgatccttgccatgataacttatctgccatgatcaaacgcttccaaaaaacagagcgtagccaaattatggttgaacctgtcgcactcactcaagtacatcaatatgggattgttgattgccaaggtgttttttgtccacaaggtaactgggcgcctattcgtcgtattgtggaaaaacctaatccagaacaagcaccttctaatctttctgtggtggggcgctatgttttctctgcagaaatctggccgttactcgatgggttgcctgcgggggttggcggcgaaatccaattaacggatgctattgatctcttattgaaaaaagaggttgccgaagcttacaccttagttggtaaatctcatgattgtggtaataaactcggttatatgaaagcctttgttgagtatggtttacataatagcgaactgaaagaagagttcgctcattggatacaagagttgtatgcaaaagatgtattatcccaaactatggccaataatcgcccaacactaaaagaagtcgataacagtgtgatgacaattttttgaggctattttgcaataatcagtagtatgccgaccgagtttatttagcggtcggcaaaagaaggagaaagagacaatgtccataagacagttatctcgattgactcatcgacttggtattttgctaacactaagtgtgatgttaatgatatccccaatgacacaagcgacagaaacccaagcaggatggcaacaatttaaagcgcgttacattactcccgaggggcgtgtcattgacagtgctaatcaaaatatttcacactcagaaggtcaaggatatggcatgttaatggcggttatgagtgacgatcgccaaacctttgcacaattatggcactggacggcaatgtcgctgtatcgtggtgatcttggcttatttaaatggcgttatgaacccgaaaataaccaacatacacccgatcctaataatgcaacagatggtgatattttaattgcttgggcattattaaaggctggggaaaaatggcatgatgaaagctatctttcagcgtcagattctattcagcatgcgatccttgaacacactttagtgaagacagaaaactacagtgtactcttaccgggaattaatggctttaaaactcccgaagaaattattattaacccctcctattttatctttccggcatggaaagatttctatcgagttagtcatgatagccgctggaaaaatttaattaacgatagccaatccttattaagaaaaatgcgttttggtaaatataaattaccaagtgattgggtaagtttataccctgatggtcatcttgccccgagtgaaaaatggccagcacgatttagttttgatgctattcgcattcctctttatttagcatgggcacaagataaactcgcattacaaccttttgtgaattattggcaacaatttgatcgtgataagacgcctgcgtggatcagtattgatggtaaagagcgcgctgattataacttaacgccaggtatgatggcggtaagagatctgacaatgaaaacagtaattgaaaatgttgatttaactaaggatacggattattactcttcagccttacatttattagccgcctttgcgcagaataatcacaatgactattaattagccccggtggatataaccattaaaataaaaagaggctagttatcagcctcttttttgttcgatatcaggacgagtcaataatcgtgttgttacagattactaatcccgatcaccttttatcagtaaatttgaaaattaattatctttgccaccggcaacgtttaatttgtcataaatatagttcttataactattaactaatttttcatcctcacaatcatttaatttgccttggcataaatgacgcatttgaatattggctttatagtaaggtgataaaggtaaacgagcgcgctctaacaacattccccctaaaaaattaatatccgttaattctccagtagaaagggttgcaccttgcgttaaattatcccttaaggtgaattgggtaatatgtgctggatcactaaaaggtgattgataattttttaggtcaatattaggttgatgatcaccaaaataaagaaacagagtggggcgctctctatttgcgacaaagtgagaaaaatcttcaatagccggatcactggcaataattttttccatatagtggctaaatttacccggtgcatcagggctttctgtctgaccagctaattgataatcatcactatgtgagcctttataagggccatgctcatacatagttaaagaaaagataaataatggcttatctgtatgtgtttttaagatttcttttagataattaatcatatcttgggtagggatagtccataaattctcttctaaactccccggataacccaattcttgtggctggataatctcatctacccctaatttttcataagcatatcccgcgtgataggcgttacgattaaaaggggtgagcagtacggtgtaatacccttgagatttgagttggcggaataaactttcattgagtttatcaaccacaaaatagaacacagagtttttacgcgcaccaaaatcatcggtatttagaccggttaatactgagaattcagaaagccaagttcctccaccaaaggtttgtactcgtaatgggctttgggcactgacaccttcatcttttttaaacataaaaagatcgggcaaatccacgtttttatcaaattggtaaatgcttgggtttacggtagattcttgtagtaatacaacaatatcgggttttacctcggtttgtgtttccggtaagaccacacggttggcttgctcgataaagtagtctgcactttgtgcatagtaagggggatgataagccgtttgataacccgacataattaaattagtcacagttcctcgaccaccgggaagcgtaccttcccactccgattgccatttattgactgtaaaatgaatagttgtaaggccaataataatgagtaataagctacttaggcgtgtagcaataggtgatttacgggagaaacgccacgcggtaaccatattaatgattagccaaatagccatggcaataatcgcgacaccggcttcccaatactgcgttaaggtgcctaaatttgagctatcaaaagcaaggttaaaatctgaaaatagcagtgactctttataatagtggactttaagctgattgataaacttgataatgataaagagtgtccctgttgtgattgccgagaatagcgcgcgggacgataaaacaaaacacagcgtaaaaataataaaataaacactgacagacagtagtgcggtataaattagagaagctttctcaaagacaataaataatgaagcaataagaacaagcgcaagatatatacgccctgataattttttcatatctcttccgagcatagtgattaaaagtttattgataaagacaagcgaagaataccttaattggctgaatgctcatatccagccaatcataaagagtaaccagttaagttagaataaccctttatctcgtaagatatgaagatcttttttacgtcgagtgaaccctgttcggtcaaaatactcaagaatttgtacggcaagtttgcgacctacggccagttcatcacgaaaatcggctgcggttacactgccgttagtttcgttatattttacgatgatagcggcaaatttttctatcgaatcatgagtataatagcgatcggcaataatggggataataagacctagttgagcagctttgcgtaataagcctcgtatgactttttcatcatttttcatttcatgggcgagatcacgaacccaccaaggctctgattgttgaaaatagtttttggcaatctgccatagtgcctcttgctctgctgtgaaggctaacccatgtgttggtagatgtagccagcctcgagtttgcttaatagcaccttcttggcgtaactgatcaattaagtgataaaccagctcatcgtgataagtgggaagagccatacgttttaaacgggaacggcccacacccatttgatcgttatgttgctggtgatattcttctagtgtgcgtaatagttttgctttagcctgttcggcattggctttcgaaatgacgacgccggaaatagaaataacatcaaaggtggttaatagcgtatcaagtgcggtttccgtcagttgctgtgcccaagcaaattgagtcaataataattcacctttgggtaaatagagtgcgaggttatcactcaccgtgttggctttatcaagtgcacttagccaagataaaaactcagcttgtcgtttaccccgacgaggagagtgtaagcagagcactttggccgccgctaaagttcgttgtgcactaatatcgcgtaaaattagtctatcgttatccaccagccacaagggttcatcaagaataagctctgctaatagcggtgtttcatcggtattatttaatagtgcaatacgtcctgtaatatggcgtgtaccatgatgaatatgaaccggttgccaatgtttaatagattcatcagctgttagactgactaatattttgtgtgaaggataaagtggtgcttgtgatagtaaccaatcaccacgagaaaccgtttctttactgacatcaccactaatatttatcgcaatgcgcatacctgcaccagcttgttctactggctgattttgcgcatgtaatgccctaattcttaccggtttgtctgcaccggttagccaaaaagtatcacctagcgcaatttgcccggcaagtgcagtacctgtgaccaccaaacccgcacctttaatactaaatacacgatcaattgctaagcgaaaacgcttatgccattgagggtgttgttgctcttgctgatgtagggtaactaaatagtctcgtaatggcgcgatacctacgccagttgaggctgaagtgacaaagatttgtggtgctgaccaacctagattaagtaagtgtgtggttatctgctgtttaacttcatcaatacgtggtggctctacacgatctgctttggtgaggatcacggtgatgttaggacaaccggcaagacgtaagatagctgtatgttcaatagtttgtgccatcacaccgtcatcacaagcgacaattaataaggcgtgagaaattcccccaataccggccaacatattagaaagaaacttttcatgaccggggacatcgacaaaaccaatgactgatccatcggtttgtggccaataggcataacctaaatcgatggtcataccgcgttttttttcttcaggtaagtgagttgtatctacaccggtgatcgcttgtattaatgttgtttttccgtggtctacgtgaccggctgtcgcaaaaatcatagtgatagagcctgtattaatgcattttcatcctcaagacaacgtaggtcgagccataagcgaccatccgtaatacggccgataataggtttttctaggttacgccaatgtgccgcaagggcatctaattgacttcctttcccatctttggcagcaaaggtaagggctgcactgggtaagctttcaatcggtaacgagccacttcctatttgcgaagcacatgaggatattgtgatatggtagttatcgccataatatgcctgaaaatgaggaagtaaccgttgcgccatatcatgaatttcggtttgtgtacgagtgagtaaacgtaatgtcgggatatccttgatcattttttcaggttgttgataaagtcttaaggtggcatctaatgctgccaatgtcattttatcgacacgtaacgctcgttttagagggtgatgttggatggcttctatccacgcttttttacctagaataattcctgcttgtgggccacctaatagtttatctcctgaaaaagtgactaaatctataccctgttgcaaatagtcctgtggcatcggctcgctaggtaaacccagtgcagccaaattggtcatagagccactgcctaagtctatggcggtgggtaaattcatctctttacccagcgcagcaagttgtgtaccttcaacttcagcggtaaagccttgaatgctgtagttgctggtatgaactttcattagcaacccagtattttcgttaatcgcattacggtaatcttttagatgggtacggttagtggttcccacctcttttaaacgacatcccgcttggcacatcacatcaggaatacgaaaagcaccgccgatttcaactaattcgccacgagaaacaaccacttctttatctggtgcgacggtggccagcattaataaaacggcagctgcattattattaacaatacaagcatcttcggcgccagttaattcacataacagatcggcaatagctcgatcacgatgtcctcgagaagcaccatcaagggagtattctaatgttgccggagagcgcatgacttggcttaccgcttcaatcgctgactctgccattaacgcacgacctaaattggtgtgtaataccgtccctgttaaattaaaaaccggttttatggcggcttttcgttgtaatgcaatacgattttttaattcttccgcccaattatcatgccattgcggtaactgattattttgtcgaataatgatacgcgcttcttcttgtagtttgcgtaaatgttcaacgataaaggtctgcccataaccatcaactaaagtttgaatgtcagcctgatggagcaaactgtctatcgatgacagttgactgtaaagtgaacgcgtatcatgtgtcatgttaatacctaattattattcattggggaatagaagggggttaatactactgcgtgcaaaaccttcttcttccatttttgcatcaagaataagggaggctaaatcgtcagctacagcatcgacgttagcatctttttcttggtataaaatttttaaataactaccacaatcgccacagctttctgctttgactggcgcattttcactatcaagagaccagtaatttaatttgcccgttagttcacaattagtacattttatacgtaccacgtgccattcggtttcacataaattacagtgtaaataacgcagtccttgagtggtgccaatttgtaccatactcgatacaggcatactgttacaaacggggcaaaattggcgattttcgccatattctgttttcgctttaccgggaatgtttgccgccagttgcgcccagtaaagtgataatgccgcccaaataaacactgatttatcagcggaaacttttgagtattcatcgtttaatagtgctgttgccatctcttctaattcggtttcagaggctttagagagattttctaaggcaattttagcactttcaggtacaacggattgtaattccgcaatgattgaggcgagtaatgcatgccaatgcttactacgcttaaaggtctttttatctaacggcgctatacccgtttgttgagaaagtaacggggttaaatctaattcaagcgggttatcatgtaatgctttttcttgtgctaaggcaatttcggcagcaaattcaagataatcagcgaaaggattgtctttggctaatgcttgaaaacgttcagcacgacgttggtagaggttttttaaattagggaataacaccggtggaataaagctgatgcttttttctgatggctctttacctaattgctctttaggaacgatgcgaatactcataacgttctatcttccttcatagtgtattacctacaaatattggcatcagaataatgcaaatttttacttgaagccatgacagcaggtaaggatatagtcaatttcttgtttatttacgcttgaagatgatcgggtaaataaaataaaaacggaggcaacagtcagcctccgtttgttcagcaaattagcgttagtgcattatttctgtgactgcttttcggcttcttttttctcttcttccagtacttcacgataccagcgaggatggtgttttttcgcccaaccgcgagtcacccaaccttcaaccatgctacgaattgagcctttcacccaaaacgctgcataagcgtgaacgataacggtaataattagtaagattgcggcaaatgagtgcaccagcaatgcaatacgaatcaccggaatggagaaatattcagcaaaataaggacgccagatgatgatgccactgaccgtcagcaggatcaaactgatagataatgcccagtaaatgcctttctgacctaagttatagtgaccaatatcacccgcttcttcattttttagcactttatgaatatttttagcccaaactaagtcatctttatcaataaagttgtacttcaggtatctgaagaacataaagataaacaaaatcgccatcgcactccccacaaatgggtgaagtaaacgtgacagttgaggcgtacctaaaatgttcataaaccagttcagagatgggaagaagaaacccaaaccactgatggctgtgaatagaaatacaatcacaacaacccagtgattaattcgctctgatgcggtatggcgaagaattttatcacctttcttcttcatcatttttgctcctccttattcacagaggtctgtgttttagaagatgcttccatctctttttgtgccgcttcttcatcttcttcggtggtgcggttagggccaacacctaagtagtggaagatagcacctgcaaatgtagcagcaaaaccaaccgccgctaatggtttccaaatacctttccagaatttaaccgttgagctaatttctgggttttctggtaaaccatggtacaggttgggtttatccgcgtgatgaagcacgtacataacgtgtgtgccaccaacgccttgtggatcgtagagtccagcgttgtcataaccacgagtttgtaactctgtaacacgttcattggcaagattaatcatcgactcttttgagccaaaatggatagcaccagtcggacaggttttaacacaagccggctcttgacccacttcaacacggtctacacacaaggtgcatttataagcacggttatcttcttcattaatacgcggtacgttaaaaggacaaccagcaatacagtaaccacatccgatacagtgctcagattggaagtccacaataccgttagcatattgaatgatagcgccttctgcaggacatgcttttaaacagcccggatcagcacaatgcatacaaccatctttacggatcaaccattccaatttgccattctcttcaacttcagagaaacgcatcactgtccatgatttagccgttaagtccgttgggttgtcataaacaccgacgttagtaccaattttatcgcggatatcgttccattcagaacaagcaacctgacaggctttacaaccaatacaggtggtaacgtcgataagttttgccacttcttccttgtaatcccgcacttgtggtgcgggagtaagggaattggtggcagagcgacgaataatgtcttgtgattgcagtgacataatttatctccttacaccttttccacattaacaaggaacgctttaaattctggcgtttgtgtatttgcatcaccgacgaatggcgttagggtattagcaataaagcctttaaccgcaaccccttcaaaaccccagtggatcggaataccaatggtatccactttgcgaccatcaacatcaagtgttctaatacgtttggtcactacagcttttgctttaatgtaaccacgtttggaactgactttaacggtgtcaccttgagaaatacctttttctgccgctaaccgttcaccgatttcgataaattgttgaggctgaataatggcatttaacagcgcatgttttgtccagaagtggaaatgctcagtcagacggtaagtcgtacctacatatgggaactcttctgctttacccatctcttcccagtcatctttaaacacacgtgctgctgggtttgaaacaacatttggatgcagtgggttggtacctaatggggtttcaattggctcatagtgttcagggaatggaccttctgccatcttgtcgatagcgaataaacgccccataccttcaggttgcataataaatggaccaacatcagagcctggtgcggcattgctatagtcaggtacatcaatacctgtccatttgctaccatcccattcgattaacttgcgttttggatcccatggttgaccttgtggatctgctgatgcacggttgtaaataatgcgacggtttaaaggccatgcccacgcccaacctaatgtgttacccaaacctgatgggtctgagttatcacggttagccatttggttgccgttttctgtccagctacccgcgaagatccaacagccacttgccgttgtaccatcatcacgtaactgagcaaatgagcttagttgctgacctttcttcaaaatgatattgccatcagcgtcttttaagtcgacaagggctttaccattgctctcttgagccacttcttcagatgttggattattaggatcaaagtaatcccaagtcatattcaacacctgctcaggcattgcgccaccttcttctttataaagttggcgtaaacgatggaaaatacctgagagaatttcaccatcaggcagtgcaattcctggggcatcagcacctttccagtgccattgtaaccagcgtcctgagttaacaatagagccgttctcttcagcaaaacaagtcgtaggtagacggaaaacttcagtttggatatctgctgttttcacatcattctcttcaccgtggttttgccagaaacaagatgtttctgtatttaacggatccatggtgataaggaatttcagttttgataatgaacggatcactttgttcttattcgggaatgaagctacagggttaaagccttggcagatatagccattgacttcacctttatccatcatttcgaaatattgcagaacgtcgtatggtttatcccatttaggtaatagtgagaatccccaatcgttatcacgttgagcatgatcaccataaaatgtcttcatcatactgacgaagaatttaggatagttaccccagtagttaacctgcccttggacggtcggttttggcgtattggctgctaaataggtttctaacgatgtttgcttttcagaaggcaaggttaggtaacccggtaagctttgtgataacagaccaagatctgttaagccttgaatattagagtgaccacgtagagcattaacaccgccacctgccatacccatattacctaacagtaattggatcatcgccatagtacgaatgttttgtgcaccaacagtgtgttgagtccagcctaatgcatacaggaaagaggctgttttatctttcgctgctgtttcagcaatatattcacagacttttaagaaatcttcttttggtgtaccgcaaatctgagtgaccacatcaggtgtgtagcgactaacgtgttcttttaatagattccagacacaacgaggatgttgaagcgtggtgtcgcgtttagcgaaaccattttcatccatctcgtaattccaagtggttttatcatattgacgtttttcaggatcgtaaccactaaagagaccatcatcaaaatggtaatcttcgcgcacaatcaagctggcattggtataagcctcaacgtactctttttgatattttttattttcgagcagatataagataacccccgataagaaggtgatatctgtacctgaacgaataggcgtatagaaatccgcaacagacgcagtacgtgtgaagcgaggatcaatcacaattaacttggctttattatggattttagcttccattgcccagcggaaaccgacagggtgtgcttcagccgcattaccgcccataacgacgataaggttggcatttttcatatcaacccagtggttggtcatcgcaccgcgaccaaatgttggagcaagacttgctaccgttggtccgtgtcagacacgcgcttggttgtcgacagccagcatcccaagtgctcttgagaatttctgggtcaaaaagcctgtttcgttacttgctgcggaggcacaaagcatccccgttgataaccaacggtttacttcaacaccttctttattgaatttttcgaagttggcatcgcgatcttttttcattaagcgtgcgatacgatcaaaggtctcttcccatgaaagttttacccatttatctgagccgggagcacgatattcaggatattgtaaacggcctttactatggataaaatcaacgagaccagcacctttaggacaaagtgcaccacggtttactgggtggtcaggatcaccttcaatatggaatatggtttcttttgcgtttttcgcgccatcgcccagactatacattaatagtccacaaccgacagaacagtacgtacaggtattgcgagtttcacgggcacgcagtaatttatactgacgtgagcctgctaacgcaacagcgggtgcaaaacctaaggcagccgctgtagtacctgccataccgccagcacagatcttaaagaactgtcttctgctgacctgcatggggtctctcctcatcatacattgcttttactgactctgattttcttcacgaaaacaggagctgattgtttttttattcctattatccttaataggatcaggttcattgcctgataggtagtgtaaaatcgttttacccgtattgttattatgtattaataaaattaggaattcatcttatggatgaaacaaaatcgacaaacttgttaactaaacgtgtaattgttggcatagatcaaacaactgtgcaacacaaaggctcccttaaccaagcagagcaggattatattgcactcgaagttccagttgcattagtgtacaacggaatatctcacgttgttatgatggcaagccctaaaaatttagagttatttgctgtcggattttccttatctgaaggcattataggatcttctaacgaaattcgcagtattgaaatcgttgaaagttgccatggtggcacagaagtacaaatagaattatcaagtcggcgctttatgcaattaaaagagcgacgtcgtagtatggcggggcgcaccggatgcggtatttgtggtacagaacaattagcagaaatttttcgccctatagcgccattaccttttacacaaacattttcactctctttgcttgataacgcactcgagcaactaaaaaccgtacaggaaattggcgagctaacaggatgtactcatgccgcagcttggctatctcctgaggggcaattacaaggcggttgcgaagatgtcgggcgccatgtagctcttgataagttgattggcttaaaaacacaacaaaagtggacagagggtgcaatattagtatcaagtcgtgcaagttatgaaatggtgcaaaaatcagcaatgtgtggtgccgaaattttatttgcggtttccgctgctacctcactcgccgttgaagtggcgaatcaatataatttgacgctggtgggtttttgtcgccgtggaagagcaactgtttttactcatccacaacgactcactgattaacgtatgtggtgaaacatccaaaggttgggttccagatagacaccatattgacgttgaatatcgatatttaacggtgccagccccataggaatggtgtagtcaccactgacaggaaatcgtaatgaagtccattgttgccatttttctgtcggtgcttcaattttcatagactgtggggcaattttgatcgtggtggcacctaagcgccaatgtgtacgtatccaaggatcaaagggctcatcattatcgtttttccattggcaatattcagcaaaagagtgcaatggataacaatgttttaatgtagggcgtacaggtacagcaacaccgaggtaaccttgtttttttgcatgctcctttaaggtattaattaagcgttgagcaatacctttcccccgataatgatgatcgatagtaaccgacaaagcagaaataagatggcaaggtaattgttgttcttcagcctccatgcctagctgaaaaacacgatcccaaccttcatctggtaaatcgttgagagagttggtttgccaaggtaacgcaatggagttaattacaccaataaccttttcttctgtttgcgtttttaataccgccataaattggtaatgggaaaaaggcacatcatataagcgttcccaatagctatcatcaacagaagttcccatcataaaagcaggccaatggttggctatcatggcttctgctttatctaacaaatcgttgcgatggtaaaaatcggtgataaatatattcatgatatacatataccttttgttaagaagcaataggtgtccatagttcacctaatttatagtcccactcttttggtttaatgggaatgcgccccgcattgggggtaaaggtcatttcactaaacagtagtgtggtttctgacattaaaaaatcgacccgacaataggcaaaaccgttagctaatttgttggctaatgtgagcatattgtcaaattgtagcggtttttcaatatattctggggtattgggatcttctaaagtaaaaggctgtaattgccattgtgtatcataaacattgatatactcgcatccctttgtatccgaaatatcaatttccgcataatgaggctgaccatgaaaacagtggatacggcatgtggttgggatcatcggacattgagtatcaaaaaggtcgatatactcttcacagataatttgcgcactaatatttttataatgccattcacgagtaacgtggtagagatttctctttaaatgaaaattaagtttcttttttgccatctccaaatcaaattgagatttatcaaggcaaataatagtactgccactgtcatgattacattttaatacgaaacggttaggtagtgtattaagttcgatttcatttggatggcgataagtattaaggattttgaccagatatttttcgcctatcttttcttttacatactccctgacactgattttatctgctaagcgtgtatagataggatctctatcaaataacatacgtgcattgattttttcattcaatgacatggggtggcgaaaattaggttgataacctaagttacgaataaatttattttttagataaacacgatctggctgtgcgagcgtgcgtaattgtttgaaataatattctaaaattttcatatgcaactgtttattttaaatatttaagtaagataaatataaatttttatttatataattttgccttaggagaaattaattttttattaatttagccttaatgtttttatgtatttatagaaaacaaaaatacaaaagaatacagatatattctttgttgtattatcatttttttatatagaatcaatggctttctagataagctttatagaataaaaaaactattatagaagagaaagcaatattgacattaagagagaattaataaaaagatgagaaattaaatatatattaatatgtagaccaatttgttatatttataggtctatcccagcggttaaaacgcaatcctttgcctgtcctatttccatgtgtatctaaaatctcataatactcttcaactatttggctacgaccgcgttgccattcattggtggtagcagcaggatcgattaaataaatatcacctacaacggtatataactcacctaaataacgaactttacgtgtggtggtggtggaatagtgagagaacatcacttggtaggttttatagtgttcaggttgcccataagggccatatttcatcgcaatatagcgaattcctttagtaccaacaggactcgtaccacctggcgttggcatatcgggtgtaatattaaaaagagtataacgtgagccaaccgttggttgccttagcgcttggcgataactatagctatccattcctgaagctgtccatgttctatccaccagaccatttcctgcccaacaatagcaagataaggcgagtaaagggaatgaaagagggataaacaaggctctagccaacataaatactcctttttattactattatgatgccagaaaactagggtgttattccgtaaaataacgctataacagcgtgccatttctgatgcttatccctttccattccaaaaggttattaaaaacagaaaataattgattatattttggacaaaaaaaacgtttagataataaaggtgaaaaggtgataaataagacagtgtagaggtaaccgtttatgaacccattaacgacattacgtgttgcaagcgtacaactacaacataaggctaatgataaagattataatttagccaaaatacatcagtttattgagatggctgccagtgaaaaagtgaatcttctagtatttcctgaaatgtgtatcacgggatactggcatgtccctaaattaccggcgcaacaggtttatgcattaagtgaaaaactggctgatagcgcatcattaaaatccattaaacaaaaagcacaacagtatgcaatggctattggtgttggattaattgaacgggataacaataataatttgtataatacttgggttgtttgtatgcctgatggttcattacaaaaacatcgtaaattgcatgcatttgaacatccggttatttgtagcggagatcaatacaccgtatttgataccccatgggggattaaaatgggtattttaatttgctgggataataatttagttgagaacgcacgggcgacggcgttattaggggcagatattttattggctcctcatcaaactggcggaacccactctcgtagtccacacagcatgaaacctattccaatggcgttgtgggaaaatcgtcagcaagatccacaagcgttacaagctgcttttcaaggtgaacatggcaaaggatggctaatgcgctggttacctgctagagctcacgataatggtatgtttatcatcttcagtaatggggttgggcgtgatgaagaagaggtgagaacgggtaatgcgatggttatcgatccttatggacgtattgtaaaagaaagctgtgcgatagaagacgatatggtcgtcacggatattgatttaacgcttttgcctgaatcaacagggagacgctggttaacgggcagaagaccagagctatatcagatcctcaccactcgacaaggtaatgaacaagatccgatttccgttcgttttggtaacaaagactaatagagataattataaaaagagcataattatttatcaggcaaaagattaacacctaatattaattttactaatttattttatgttagaataataaaagaaactaatataggtttgatgataaataatggatacacgtttattaaatgcttttgtggtgttagctgatacagggcactttggtgaagcttccaaacagctttgtattagccaacccgcattaactaaacagattaaaacgttggaatcacaactggatatcgtgttgtttgagcgtggtcgccatggtgcaaagctcacgcaagaaggacaatatttactcaatcaagctcaagtagtattacgggaatcccatattttagaaaaacaagctcgtcaattagttgagccacaaaaagtctcactttatgcgggattcggtctgtcatcattaagttttattacttcactattggcgaaatttaatcaaattgagccaaatattagtgtcaatattgatgatatgtcttctcataaaatggaagaaaaattattaatgggtgaacttgatgtggctttttctcgtttacccgttatgccccctttacaagggatagcgttgacacaagagcaactgatgttagctattgcaacacaacatattacggtgttggaggcagattataacccattacattatttcgactcattagggcttattctacttgctccagaaaaagggaaaaaactgtatcagcagatacatgcttttttacaacagcataaactagcaccgcgtttattacagcaatctcaagatattcagacccaattagcgctagttgcagctgggttagggatagcattagtgcctaaaagcgcgcaattaatttgtgataaacaaagagtcacattgttacctctatctgggttatacacacaatggaaaattggtgtaatttggaatagtaatattaaaaataaagaacgtgatctttttattaaaataattactgaaaaaattgatattaaataaacaattagctttctttatttcttttaatataaatattctatttcaatttttagtctctattaaatattaattagttttaaaataaataggaataatcaactgagatcactctcacaaaaaataaacataagtttataaaggttttatttaagctttatgataaaaaataatttaaaacattaagttaaatgatttttgttttgttaaatgtatttaatgggaattagcgtgctttaaaagatctatttacaataaaataagaatgtttaatatcaaagggcagtcaactcaagaaaggtacttgccttgttttaatattgagtaagaaagagagaattaaaatatctctctcatggataatttattagtgataataaattatgatcttatgtaataaataataaggaagttattatgaaaaaaataaacatttttacgggtactctatttgttttatctagcataagtatggcacaagcagaaatccattctaatcaaagtggccctttaaccaccatgagtgtgggggcgagtgatcccgtgactcatggccctcatcaatcagcaggtggggagccgggtgttggtatttctaatctatatgggggtaaaaaaattggttttgcgtcattaacaccaaataatatgagtggtggggcggatagccatggtgtttatactgtccaatctaatcatcatcataataatcttggcgtttttcatttttcacaggtgactgatgccaatgtctattttggtacttgggcaaaaacagcctctgttacagatatcactcatcagtcttattatgtaggtaaagaggttactagtacgctaccgacagacagtgcaacttataccgtaacaggtatcagtcaatatagtggtgataatttactgtctggtacttttgatgttgatttttcacaaaagacaattggtggttcactggctaatagcctacgtactgtcgagttagaacgtggcaatatttataccgcaaataaccaagtaactttctctgcagatgcaaaagaagataccacatccggtattgttgaaggggcgttctttggtgaaaatgctgaaacattggctggtattgtcgtcttccacaccgatcatactaaagatattggttttggaggaagcaaaaatagtgctgaagtagatactgcaacagatagcgtaacagatagtgcagaagcctcttaacgttaggttttaagttcggagcttaaaaacaatttagtccttttacatacgtggtattagtggtcattaagctagtttttagcaacagataatcaaatatacggttatctgtttttttttgccttaaaaaacggattgtaaggaatagatctattgttattataaggataaaccatgcgttattatcaaaggctaataaagtcattatttattattaatatcttatttcattcgtcacagggggcggcaacacaacctaatcaagagcagcttaataaagagaaggtcgctcaattaggtcaacaactgtatcaccatttacagcaacagcagtggtatcaagcggaaaaactattagttaattatcagcaattaccattacacgaaactttattagtctattatgctcaagcactattagcacagaagaatggtaatttcttacaagctgaattttattatcagcagcaacttaagcagcaagcagattttattccggcacaaacaggtctaattcagctctacttttctcaaggagaatataaaaaagcacaataccagctaaatcaattaagtcgtttatcgggattatcacctgccattaatcaagcaattatctattatcagaaacagcttaacgattattttaaagctaggcgtttttatcaaatcagttttttttatgatgataatattaatcatgcaccttatcttgatgagcaaattgtttcgcaatcaacgcaagtcatcatgaccagaaaaggcgctcaacctatagcatcgatgggggttagtcatcttttttctttctatcagcccacttttatttacgctaataataccctatcaggctatttttcagcacgctaccgtgattattttgcatataaacaagctaattttacacatttatatactcaattaagttatcagtaccaaaaaaaggattatcggtggaccttatctccttattatgaaataaaatcacctaaaaaggcgtttgagtatcaatctattggggtatataccgggctatttttctctattaataaatatcattctattaatttatctataaattattatataaagaaatataataaagaattaataaacttaaataatcataagcagctatatgctattagctattactatacattagcagagaatgttcaattagttaatcaattaaactattatagtagtcgtaaaaaaaatactttattaaattatcagcaatatgatataaaaacgggtgtttattacttattaccaaaaaattggcaagtttctctttctttacaatatcaatttaaaagttttaataattataatccattattaaataagaaaagagaagataatggctttgtttttacaacaactattaaaaataaagcacctattatctggggtttttatccagcaatagaattaagttatacccgtagattaagcaatgtggattggttatatcaatatcagcagcatgaagtcttatttaaattagaaaaacaattttaattaatttaatgcatgacttctttattaattaagtaggtaacacaatgcatgtagtgctttttcacaaacgtacgttagtctccatgatggtttcactctccttattttctctcaatagttattccaagacgaaggataatacaaccgatcttggacaaattcaggttgcagataatttagaaaaagatcaacaaggttatgctcaagtctatgaaaaggatgtggctaatatttatttaggtaaagcccttattgaacgttatcaaggggtatcgcctgcagatttatttaaaagcgcgataggtgtttatagtggtgaagcccgtaatggaggagcattggatccgaatattcgtggtattcaaggccaagggcgtatccccgttactgtggatggtactgagcaggcgattacggtttatcgtggttatagcggtgcatctaatcgtaactatattgattcaaatttgataagcagtatctatatagaaaaaggtccttcacttaatcctaatataaaaacagggattggcggaggggttgccattaaaacattagatatacgtgatattgtgcccattggtgagtcttttggtattaattttaaaggggatattagtaataatgccacaggctataaagatatttatatcaatatgattgaagattatcgtaattatccaaaattctatcataaatattcttttttaactgatcccgcattagaaataacacctgaaaaaaataaagatttaaagtttaatgactatgcgtttcgtattggaataggatttgagaatgaaaaatttaatttactctttgcatatgcattacgtgaaaagggaaattatttagcaggtaaaagaaataaagacgattatcttaaaacagattacatgcatgagatacatgctacagatcataaattcaggttaacaccttatgtgccttttattgctcatatttatcgacctggtaatgaagtgccaaatacatctaatcgtaaccgctcttttttagtaaaaggaactctatttccacaacaagcgcatcgtttctccattaattatcgatacaccgatttattatttggcgatattatgccattacgtttaagttgggctcgttatgaagaaaatttagttaatcaatggcctttggcaaatattacacaacaagcaggcatattaacttatcaatataaaccagaagataaaaaaacagatttattactgcgtttatggggcaatttaacgacaggaaatactaatactcgaggaggagcacctcgacaacctaagaatagagatataactaatgattttgatcgatatttatttatgaaatcaaaatctgaaagtggtatgagttatgacactgatactcgttttttagatacagcttctctatatcaagataataatcgttatggtgttgatttttcatcgttatttaaattatcacctcagttttctatttctttttccggtcaatatcaattggaaaaattagatagtcatgagcttgaacttcccatgggttttgatttcgtgaccgaggggcgagcagggcaacgtcatgaagtcaatttagcgttagccacagattggaaaccattaccctggtttgcgatgaatattggcggtaaatatcattactatcatctgacggatacctttttaaataataaacggaagaatagggttaaaaattacgagaaaacagcccctatccgcggttatctgatctcttatcgacgagtattaacgccagaagagtatttactctatcgcgcggttaataaaattgatgtcgatactttacctgacgagttaaaaaattaccgaaattctgctgagctgagtaaaaaaattagagactttcaacaagcggatttagtttaccctgaaggtggcgctttgctagaggaaatcaaggagcagatagttaggccatatcttcagagaatacagcatgatatggagcatgaagattttcttcgtaataaccatggaaagatgcaaataaaaaacgctaaagctatcccgatgaaaagagagtttagcctttggttatttgatgaaaatggcgtgctatctaagagtaagaatattttacttaatggttttcttgatatggaggaaaaagtccctcatccagtgacgggggagttagtctatcgctttgaaaaagatgttattaatcctcaggcattttctctatcagaagatattcaagatccctacgcactggagcctagctatcagcatggcgcattttcccctttaatctctgccaccctttatgccaacgatatggtgcgtttttatggccgttatactgagcaattgcgtttacctaacttatttgaagataccagtggtttttcaggctctaaagctcgctattatggttttaagttaaagccagagcgtgccaaaagcagtgagtttggtgtggttgttgattttacgcattggttgaatatagagcgccatgctgatattaaaattaattactttaaaacgaacattgaaaatgtatttgatagagatgctaattggcaaattagacagttagaaaaacaaatattagaaggtgtagagttacaagcccggtttgataatggatttattttctttgataccgcattagtgtatagccataaaaataaagtctgtgatgaaaatgctttttatgagcttgatgcatcaggattatcgggtattaaaaactgtatgacagggggataccctggcggatttttgcgcacctcaatgcagcctaaatactcagttaacctacatttaggcacgcgctggctaaatgataaattagaattaggtagtcgctggctctattcatcagaagttgaaaataaagatgagaaatggcttaaagaaaatttacctaatagctattttggcataaataataatccgatgcgttgggcaaaagtatttactattgatgcttatgcaacttatcaatatagccccaatttatcttttgaaataacaggaagtaatttattaaatgaatattacattgatccgctgacccgttctggtatgccggcaccaggaagaagtttgcgattaggtgtaacagcccaattttaatacaaggataaaataggagttttatttatgttggcactttctgtcagacagccacttaatatttattattggctcattgcgatatcattagtttatatcagtttattgagttgggtgcttaattcatggtctatgacagaaagtgcgcaccatattgatcagcaacagcaaaatacattatcggtctatcaggtgatgttttcgccacctaaacaatctactaccatgattgaaccgagaataaagatcgagtcacaacaaccacctattgcactaccaagaagtgagaacggtgaatttattgaagcgcccaaacaacccgcaaaaaagcgtcaacaacaaccgaccccaataacacctaaagtgataaaacaggtaaaaaaacagccagtagtagacaaaacagtacctataaaaccacgtgatttaacaaatcacaacatagttcaaagtacatcacaaccatcagcagaaaacttaacacagcataccgcgagttcattggctgggagcagtcgtgcattaagtgaaaatggtattggacagggagagtctgaaaatcactatatcagtttattgcgccgagaaattgagcgtcataagcgttatcctgcgcaagctcgtcgtatgcaagatgaagggctggttgttgtgcgtttttcattaaccaatgaaggctatatttcatccgttgcacttgaacagacctcaggggtggcatctcttgataatgctgcacttgccgcggtaaaacgggtaaaaccaattggcccgaaacctaataacttatctgatcctttaactatctcgttaaaatttcaattaaattgaataaaaaatacctaagtcaatattacacttaggtattttatggaaataaaacattagaataaaacagtcatatcagccaacaaggtattaggctcaaaaaaatagagatgaaaatagagatttttttgatcttcttgactaaaaatacaagataaatcaatttgataagtataaaaataacttttattatcggaaataggatgattaagtaatggggttattttataaataatattatcttgatctgtggtgagcttaaattcagcagaaccaataatagtgccttgggtcgcatcgcccgttcttgccactatagctaatgattgttcctgcgtaattgcacactgtaataacaaggtgattttttgtgataaacccactttgccaatcggctcttctgatggtaagcaaaaataggcatcgtgatttaacaaaatacaatttttccccactaacatatcactatagccatattgagctttgcttaattgagtcataaacccatgatttaaatcgagttcatagctcttttttgctgtgggtaaatgatttttagtgtcaagaggtaaggatgcataaccatcataaaaacgaaatataggtgcagattcggttaaccaagctcctgagtcagcttgacagctttttccattgtgacgacttaaataaagatttacgccattaaagcagtagccaggaatattaagatacgatttattatctcgattaccttgaccgatagtaaaactattattgttaacatcatcaagtaccatatattttaaccctccccaaggtgtgtcagaaatatagcgaacggagggtaaaatttgcgttggtgacagataggctttctgactgtctggggtaaaaaatgtgtcgttttttataacatcatggctatctcctgccacgccattacagccttcatattgaaaactatctacctctttttcaggtgttaagtagttctgttttaaacggatcactgcatcaatatgagagtaggattcaatactttgtagcatggatgttctatgtaatatatcttttcccatctcaacgtaagtcttgtaataactgatttttggatcatggctatagtcatttccataaagctctaagctattccaacgagcaaagggggttgtaaattcaatttcaaaactacgtttaacccaagtttgatagaaagataaaccagaagtatagatacccactaaaaaagtattacatttattataatcatctttaaaaacttgggaggtctgctgataaatggctttatgaatattggcgttaaatttatcaatgctgtttcttaatgtttttagattatttttgaaataatcctcttccagagcaagtttttctttattggttaatatatcgcaatgggcggcgacaaaaagtgcgcaacagtggcaataaaaaggcaatcctgctgattgtgctaaatttaatactaatggttgttgagcaataattgtcgaaatcacatcatcaaaacggttaagaacttgttcccgtaaatctcgtagttgtgtttctgaataatgcacattggggtcaaggtaacgagcgagagaatctgaaaataattgataaacgtcgctaataccttctgtggtgagtttaatgatttttatattgttatcagtgattttagcatcaataatacgagagacatgggcaataatttgctcagctaacgagctatctttcatatttttattcatgaggccaaaaagcgcggaagtaatttttgaaagtactcccccaacaacaggtattagaccaatgatatgacccacgaccacttcacccaccataataggcgcattaagcggatcttgttgattaaattcatccacaacagtgggtaatatattactgttgcgattaatcatatctaacatcccatcctttaagtcctcatattcaatgcaggttaaaggttgagtgcaggggagtgacgaagggcttattgatatttttaacggatttaaatgcataaaagagactccttctctgacgtagtattatttaattccatttttctattaattgaggtgtacctgataagccgttataaacagtgatagataattctgtaccacggatttctacggctaaataatctcctttaaatagcgcaccactattataaactgggacatcgccgaagatctcactgccaccataacggttatcttgaccaacataatgggtatgcccaacaaataccgcttttaccccgtaatgttctagcatatatttaaagaaggtcagctcttcttgagatgatttttctgggaagtgttggtttccatcatggaagtttaatatgatggttttattgctatttcgggcctgaattaaatctttttctaaccaatcaatagaatctgtgacattaatggttgaagctgaccagtgatcgagcaccacatgataagtgggatagttttgtaattgtacaaaatgaatatcaccatattcccaagagtaagccttactacctgaatattcgctactatcgtatctaaaattacctgaagtcgcataattacgatactcttcaatacggtagtgcatatcaaaaaccatgccccttgcacaggcattcatactgtaatcggcattactcggctctgcacagtcccctacattgttttgatagtcgtgattaccaagtccaacataggtattaaatcctaaaggtgaaggggcaaacagtgcacgaaaactctcacgttgggagcgacggccaaattctgttaagtcaccatttataatgccaaaagcaaaagatttttcacggtgtaatgcttgaatactgtctctaacgctttttacggtggtttcccaacgggattgatcattattggggtcattattatctagatctagacgccaaggttgtggatctgacatgacaataatattgtaatcagtagattgtgttgttgtcattgcgatactccttgttacatttttatcggttagcctcctttttgacctaaatagccataaactacaattgcaaagtttattagtggactgtgcgaaacattggagaaagtagtgaaaaagagaaagcggcgctctagaaataaaacctatagagttaccgcttttttatggtgaggtaaattgattaaatggctttcttctgtgatttattcgcgatccacagtccgctcattttcatcgagtaaccaaataaaataccgagaatgagtgaagggatagcttgtgttaaatgaccttgtgcggcaaaaatagtacatgcgccaataaaagtacccggaatataagccagtaatgtgcttttagcttgcacacacattacaaaggcaattacaccggtgacggcgtagccaaaaatcgcactatcattaaacagttggctaccataaataatcgctaatgcccaaataacaccactcataatagtcgcaatcgtcacgactaagcctttaaaaccttctttagggtaggcgaaataagccgtgcaacctaaaaaaccagcccaacttaataagtcaaattggcttgcaacaaatgcccaaatggcagaaagaatgcctgttgtcagcgcagtaaaataaagcgttctcacgatagactcttaaaagtagtggggatatttaccctgttaactaaaggtgaagtttagcattgtcattagttgatttactatatttagatcattaaacatcatcatttaaataacaaattttttgctatctgaaatctatttatctattgaaaaataaaaagataaagtaaacgattgctttattagatttatcgttaaataaaaaataaccaagtatgttgtttgatatatattattaataggttaattaaaatcgagtatataaataatataagaaataaaaataattaatttatgacactctttttgaaaaaagcattacctaactttatatcgtatatatgcaatttttacctgctataaccggtaaagtaatatttacacgctatagcaggtaaatggctaaatgttagctaatctaacagcgcgtgctttcattccatctaatattgtattgctaatctcagaaggaaaatcctcgggtaattgctgttttacgcgttgtatgacatcgtccatttcttgataaaaataacgaagaatatcgctcattaatgaaggatcgaaaccgacagcttcagctgtttggtagaaatgacgaggaaaaatttgttctatggcgtattttttgcctcggcttgcttttaatcccatagcaagttttgcatctcgtggattaagtcctcgtcctccgaaattgggatagatggacataatgtcataaaggggagtgagatggaaacgtccttcttggttgataaaaacagaaaaattctttgcgtgtccatccgttgcagccaaaagccaaaatagcacttgtgccttcataaaatgaaaacgatcttgatcggcatttgatgagccaagtaaatatttcataatatcgataatgccaggccctccttcattttcatattttagcgcagaaggtatatttaaaatttggcaaaaatcttcttgaggtaaacgtattatccacgatttatcagatgaatattttctatcaaaacgttctacagcaagcgctttaacattttttgttttaataatagagcagtgggggacgggaagatcaaattctttggcaattaaggtacaaagatactcattttctacactattggataaatccattgtataagaatgactttcaataacaccaattggcagtttaataatatgggtagttggtgtgttattatgtggcacacaccaatgattatcttttaaaagtaatgctgttttttcttgtgctccagcgatggaaattctgaaatcagtatattctttaagcataccgagtggagtattggatttatatcctagtagaattttttcaagctcaatatcattgagtttttgatattctatttttttgatatccgcaggcgtactgccactaggaagtaaccttaatgcaccaacagtatctgcaccgatagccgctaataggtcaaagggttgatttgagttcgcattatagcgactcacaatacgatttctaatttcagtattatcaggtaacagattatcaaagaaattatagacacagtctccttgatattcttgaagctgtaatggcatcgaaagagagatgggacgacttcctggttgattaacccaatcttcagtatattggaatgaatgcgcacctgagctttttttagtaaagatgcccacatagtattcattcatatatacatcaagactcgccatttaccactcctctttccattcacttttgtgtgctaaattatttttagcatctttaggatgaatttccatctctaaatttagtgcggagagcagtttgaaaaaggtttctagtttggtggaattaggattaagttcaaaattggacacggtatcttgtcggatccctactttttgggcgactttactttgagacagtttttttgttaatcggacatcttttagatgcacactgagttgataggcattaattatgatcatcatcttctaccggttataggcgttaatatctaatataccggttatagcgtgtagatcaagatttaatggttatagcgtgtagagttataattacctgctataaccggtaaagtaatatttacacgctatagcaggtaaagtttggtcgttacttcccaatacagaaactagagaaaattcgccctaataaatcatctgatgtaaattcaccagtaatttcgcttaatgcttgttgagcaagtcttaactcttctgctaatagctcacctgacttggcataaaccaattgctgatagccttgttgtaggtgttcagcggctgtgtttaatgcttgtaaatgacgacggcgcgctaagaagcccccttcagtattgctgttaaagcccatggcttctttaaggtgtgagcgtagtaattcaatgcccattccatcacgggcagataaacggatcatcggatagtcaccttgcgaggtgatctcggcaggttcacccgttaaatctgatttgttgcgaataacggtgaccggcagtgtgctaggtaaacgagccataaactcaggccagatctcttccggtgtcgtcgcctcggtggtggtactatcaaccataaagaggactctatctgcttgctcaatctcttgccatgcacgctcgataccaatacgttctacttcgtcactggcttcacgtaaacctgctgtatcgataatatgtaatggcataccatcaatatggatatgctcgcgtaatacatctcgtgtcgtacccgctatatcggtgacaatggccgcttctcttcccgctaatgcatttaataagcttgatttaccagcattagggcgcccggcaatgacgactttcatcccttcacgcaataggctgccttggcgcgcttgcgtacgaacatcgtctaattgactgataaccgtattgagtttgccctcgatcaccccgtcagaaagaaagtctatctcttcatcagggaaatcaatagccgcttcaacatagatacgtaaattggttaaggactcgaccatctcattaatatgagaggagaaagcaccttgtaaagagttaatcgcagagcgtgctgcttgctctgaactggcatcaattaaatcggcaatcgcttcagcttgcgctaaatcgagtttatcgtttaagaaggctcgctctgagaactcaccgggcttagcaatacggataccgggaatttgtagaatacgctttaagagtaagtcgagaataattgggccaccatggccttgtagttctaaaacatcttcacccgtaaaagagttaggattagggaagaaaagggcgataccctgatcaagcactgagttatcttcattgcgaaaaggaagatagtcggcataacgtggcttaggtactttgcctaaaatagtttgtgctacaacagccgctttagggccagaaacgcgtaggataccaacaccgcctcttccaggaggtgtggcctgagcgacgatagtatcagtgctatgcatggtgaactcgcttaatcagaataatcattaatcgtataaaaataaaaaaacagaaggcggcctattagaccgccttcactattttatgtcacttttctttgaatgtaaccaaagaagaggtttttcctgatgtgaccttattttttgtctctactatgtagcccacgtttttccagaccgcggtagattaactgctgctggataatggttactaggttactgacgatatagtacagaaccagacctgatgggaaccacaggaagaatacagtaaatacaaccggcataaaggtcataattttttgttgcatcggatcagtgactgctgttggtgacagtttctgaatgatgaacatcgtcacacccattaataatggcaggatatagtacggatcttgtgctgataagtcttggatccataatataaatggtgcatgacgtaattcaaccgagcccattaacatatagtataaggcaaggaagattggcatctggataatcagcggtaaacaaccaccaagaggattaactttctcttgtttgtataacgccatcatttcttggctcatacgttgtttatcatcaccaatacgctcacgaagtgccgccagttttggttgcagtaaacgcattttcgccatagaggtgtattgcgctttcgtgagtggatacataataccacgaacgataaaggtgatcatgatgatggagaaaccccagttaccgataaagctgtgcaggaatttcagcagcttaaacagtggctgagagataaaccataaccaaccatagtcaacagataggtctaaatgtggtgcgattgcagacatttcagactggatctcaggcccgacccataatgttgaagtgatatcctgtgtgctatttggtgcaacagtaataggtgctgatttataaccaatcagtgcgatagatttattatctaaagtgatagagtagaagttgttattctgactatctttagctgggatccacgcggttgcgaagtattgttgtaacatcgcaatccaaccattgttggttgtgatagaaaggtttttatcttcgatatcaccaaagctatattttttatagttggtttcatctgatgaataagccgcaccacgataggtatgtagcgcaaagttgctacttccagtatcacggtgttctggtaacttaacagattgttttaactgaccataaaagttcattgtcagtgttttatctgttgggttctcaactttgtattcaataccaatgtcatactgaccttttttcagaataaaggttttgacgaatttcacgccttcttcattcacaaaagtcataggtacacgtaattcatcttggttttcacctaagataaattcttgttgtgtggcactgtagacagggcgagatttctgatctggaccatcagggccaattaagccactttgagcctgatacaggaattgaggtgtagtttccagtaaacggaaaggggtttttgaattaagctcggcgggataggctaacaaatcagcctcatcgatagtaccgccctgagtattgatacgaagatcaagtacgtcagtttttacggtaatcaattttgcctgctcattgctgttaccagtcacagcaagactatcactgcttggcatgtccgcttgttgcgagacctgagtagtagtggtggtgttttgtgatactttatcaccctcccactgctgccagatcaggaaagaaacgaacagtaaagcgatgaatagaagattgcgttgcgaatccatcgttaattttctctgttatcgtcgttttttctaggtgggacaggatcatcaccaccttcgtgtaaagggtggcattttaatatgcgtttcactgttaaccaactaccttttatcattccaaacctgcgcaatgcctcaataccataatgagagcacgtaggattgaaacgacaacgaggccccaacagaggactaatccccagttgatagcccctaatcagcaagatcaggatttttgagccaagcgacaatgacgacgccataatttacccaacacttccgtcaattggtggttatcaagttcagctacccccttccttactaataccacaaaatccatagcaggtaattgatgctgatgtaaacgaaagtattcacgggctaatcgtttaatccgattacgctcatgagcacgtttaacgtttttctttgcgatagttagaccgatgcggggatgccccagctcattctggcgacccaaaattgtaacttctggtgaactcgcacgctgtggctgctggaaaacaaaattgaaatgcttgggagttaacaaacgtaactcccttggaaaagcgagcttaaccacggaatggttagcttttattatttcgaagaaacggtcagacgagcgcggcctttcgcacgacggcgagccagaacctgacgaccatttttagtggccatacgagcgcggaagccgtggttacggttgcgcttcagtacagacggttgaaaagtgcgtttcatagcgatttctacctactttatattattactgattcagcaaatgcgttgacagacaggagtgcaataaataaacaaaccagtacttcaatcgcagcatcaatgatggaaagatgcgggattgtaataaaatcactcaaatgcgtcaatgaagatgacgttttaagtaccgatttttgtcgtcttttttagcaaacccgattatcaatccttacttatgcgcaacgctcgctcttatcgacaccctaaaaagggaagataaagggcgaattgttggtacaagcacgcagggtgcaagattatacggactcagggtgaaagcgcaaggatctttggtggatcatcatgcagataattgatcatcctttataagaagagcagaaatttacctacagaaagttatccccaattgctatttatagggtgactcaagtacactagaactcccttacctatttatttcggagaattatcacaaataggtaagcctgtggataaaaaccataaaaactgtgtaaaagaaagaggatcttcgtttcattttgcgatatgatcccccgtcacgatcagaacaaccagtctgcgatcgtgaagcacgatgtaaaaatcgtggtcatcaaagttgttccttattaagaattgaagaggaacggtgttgtgtacctaagtgtttaatcacatttttcctgtttattttttagtcttgtttttgaggggagtccgccgtgtcactttcgctttggcagcattgtcttgcccgattgcaggatgagttacctgccactgaatttagtatgtggatacgtcccttgcaggcagaactaagcgataacacgctggcactgtatgcacctaatcgttttgtgttagattgggtaagagaaaagtacattaataatattaatgcgttattagtcgacttttgtggttctgatgtcccttcgttgcgttttgaagtggggaataaacctgtatcagcacgtaccaccgagagtgttcccaaaaccgtgacacatcccgcggttaattccacaccgactaacagccagcctgtgcgtcctagctgggataatcaaccgcaatcccagttacctgaacttaattatcgttctaatgtgaatcctaaacataaatttgataatttcgttgaaggtaaatcgaaccaacttgctagagctgccgcaagacaagttgctgataatcctggaggagcttataacccactgtttttatatgggggaacgggtctgggtaaaacgcatctattgcatgcggtgggcaacagtattatggaacgtaaagccaatgctaaagttgtttatatgcattcggaacgtttcgtgcaagatatggtaaaggcgttacaaaataatgctattgaagattttaaacgctactatcgctctgtagacgcgctattaattgatgatattcaattttttgccaataaagagcgttcacaagaagagttttttcatacctttaacgctttgttagagggaaatcagcaaattattttaacctcagaccgttatcctaaagagattaacggggtagaggatcgattaaaatcgcgctttggttggggattgactgtagccattgaaccaccagaattagaaacgcgtgtggcgattttgatgaaaaaagcggacgaaaatcaaatccagttacctgatgaagtggcgttttttattgctaaacgactccgctctaacgtccgtgaactagaaggtgcattaaaccgagtaatagctaacgcaaattttaccggtcgagccattaccatcgactttgtgcgtgaagcattacgtgatttactcgcattacaagagaaactcgttactatcgataatattcagaaaactgtagcagaatattataaaattaaggtagcggatttgttgtcgaagcgacgatcccgatcggttgcccgtccgaggcaaatggcaatggcgctggcaaaggaattaacaaaccacagcttgcctgaaatcggggatgcctttggtggtcgtgaccatactacggtactgcatgcttgccgaaaaatagagcaactgcgtgaagaaagtcacgatatcaaagaagatttttctaacttaatcagaacattatcatcctagcgctatgaaatttatcattgaacgagaacagctgctaaagccgctgcaacaagtcagcggccctttaggcggtcgcccaactttacctattttaggcaacctgttgcttaaggtgacggagaataccttatcgctaacaggtacagaccttgagatggagatgatggcaagagtgagtcttagccaatctcatgaaatcggtgcaacgactgttcctgcgcgtaagttttttgatatttggcgcggattacctgagggagcagaaatcagcgtagaattagacggtgatcgcttactcgttcgttcaggaagaagtcgtttttctttatcgacactccctgcgtctgatttcccgaatttagacgattggcaaagtgaggttgaatttactttgccacaagccactctaaaacgtttgattgaatccacacagttttcaatggcgcatcaagatgtgcgttactacctcaacggtatgttatttgaaacggaaaacacggaattgcgcacagttgctactgatggtcaccgtttagcggtctgtgccatggatattggacaatctttacccggacattctgttattgtgccacgtaaaggtgttattgaactgatgcgtttacttgatggcagtggtgagagtttattacagttacaaattggcagtaataatttacgcgctcatgtaggcgactttatttttacctcgaaactggttgatggtcgtttccctgactatcgccgcgtattaccgaaaaatccgactaaaacagttatcgcaggttgtgatatcctcaaacaagcgttctctcgtgcggcgattttatcgaatgaaaaattccgtggggtgcgtattaacctcactaatggacaattaaaaattaccgctaacaaccctgaacaagaagaagcagaagaaattgtcgatgttcagtatcagggggaagagatggagatcggttttaatgtgagctaccttcttgatgtgttaaacacactcaagtgtgaagaggtaaaattattactgactgatgctgtttcaagtgtacaggttgagaatgtggcaagtgcagccgcagcttatgttgttatgccgatgcgcttgtaatcacgattaatatgattttatcccgtttattgatccgccattttagaaatattgaacaggctgatttgccattagcggatggttttaattttcttgtaggaccaaacgggagtgggaaaaccagtatacttgaagcgatttacacattaggccatggacgggcatttcgtagtgcccaagcgaatcgagtgatccagcatgatgaaaatgcgtttattttacatgggcgtttaagtggccttgatgaagaaagtcgcggttactcaattggtttaagtaaagatcgcgagggtaacagtacggtacgtattgatggtagcgatgggcataaaattgcagagttagcgaagttattaccgatgcaattaataacccctgaggggttcacattacttaatggtgggcctaaatatcgtcgtgcttttatcgattggggttgttttcataatgagcctcgattttttgctgcatggtcagatttaaaacgcgtcttaaaacagcgtaatgcagcactcaggcaagcgtcgtcttatcgacaactcttaccttgggataaagagcttatcttactgacagaacagataagccaatggcgagctgaatatacagaagatatcgccaaagatattgaagaaacgtgccaattatttctccctgaatttaccttgaaagtcagttttcaacgaggatgggataaagaaaccgattatgcacagttgctagaacgtcaatttgaacgtgacaaagtgttatcatatacctcgttaggtgctcataaagcggatttacgtattcgtgctaacggcactccggtagaagatatgttgtcacggggtcagcttaagttgttaatgtgtgcattaaggctggcacaaggtgaatatttcactcgtaagaatgggcaaagatgcctgtatctgctcgatgattttgcttctgaattagacgcaaatcggcgccagttgttagccgagcgtttaaagtctacgcaagctcaggtgtttgtcagtgcaatcacctctgggcaagttaaagatatgctagatgtaaatagcaggctatttagcgtagaacatggcaaaatagaggttaaaccataggaataaagcgagaaacgttgatgtcgaatacatatgactcctcaagtatcaaagtattaaaagggctggatgcggtgcgtaagcgcccggggatgtatatcggggatacagatgatggaaccggtctgcatcacatggtcttcgaggtggtcgacaacgctatcgacgaagccctcgcgggttactgtgatgagattattgtcactatccattcagataactcagtctctgttcgcgatgatggccgtggtattccaacgggtattcatgaagaagagggcgtttctgcagcagaagtgattatgacggttctgcatgcgggtggtaaattcgatgataactcctataaagtctctggtgggctgcatggtgtaggggtttccgttgttaatgcgttgtctgaaaaacttgaactgactatccatcgtgatggtaaaattcatcaacaaatttaccgttcaggtgtacctgacgatcgcttaaaagtgattggtgaaacagataagtcaggaacctttgttcgtttctggccaagtcttgatacctttaaaggtgagactgaattccaatatgatattttagcgaaacgtctgcgtgagctctccttcttaaactcaggagtctctattcgtttaattgataaacgtgataaccgcgaagatcatttccactatgaaggtggtatcaaagcattcgttgaatacttaagccgtaataaaacgcctattcaccaaaatgtattctatttttctacagagaaagatggcattggtgttgaagtggcgatgctgtggaatgatggtttccaagaaaacgtttattgctttaccaataatattccacaacgtgatggtggtactcacttagttggtttccgtaccgcaatgacccgtacgctaaacaactatatggataaagaaggctttaataagaaatcgaaaatcagtgcaacgggtgatgatgctcgtgaaggcctgattgcggttatttctgttaaagtacctgatccgaaattctcatcacaaacgaaagataaactggtttcttctgaagttaaaacagcggtagaaacgctgatgaatgagaagctggtggaatatctattagaaaatccgactgacgcaaaaattgttgtcggtaaaattattgatgccgctcgtgcccgtgaagctgcgcgtaaagcacgtgagatgacgcgtcgtaaaggcgcactcgatttaggtggtttaccgggtaaattagcggactgctctgagcgtgatcctgctttttctgaactctacttagtggaaggggactctgcgggtggctcggcaaaacaagggcgtaaccgtaaaacgcaagcgattttaccgttaaaaggtaagatcttaaacgttgagaaagcgcgttttgataagatgctggcatctcaagaagtggcaacgcttatcacggcattaggttgtggtattggccgtgatgaatataacccagataaactgcgttatcacagcattattatcatgacggatgcggacgtcgatggttctcacattcgtacattattactgacgttcttctatcgccaaatgccagaaattatcgaacgtggtcatatctttattgctcagccacctctctataaagtgaaaaaagggaaacaagagcaatacattaaagatgatgatgcgatggatgaatatctgatgtctattgcgcttgatggtgcagcgctttacgtcagtgaacatgcccctgctatgcatggtgcacaattagaaaaactggttgttgactaccatgctgcgcataaaattattcgtcgtatggagcgtctctatccactgagtatgttaaatagcttggtctatcactcaacgctgacagaagatgatctctctgataaagcgaaagtggaagagtggatgagtggcttggtgaaccgtttaaataatgcggaagagcaaagcagtacttacagctataccatcacacaaaacgaagaaaatcgtttatttgagccagtattacgcattcgtacttacggtatcgatacagactataaattggattacgattttattcatagtagtgaatatcaacgtattactaatttgggcgatattattggtaacctgattgaagaaggggcctatattgagcgtggagaacgtcgtcaggcgatttcaagctttgaagaagccctagaatggttaaccaaagaatcacgtcgtggtcttgctgtacagcgttataaaggtcttggtgaaatgaacccagaacaattatgggaaaccaccatgaacccagatacgcgtcgtatgatgcaagtcactgtgaaagatgcgattgctaccgatgagttattcacaaccttaatgggtgatgctgttgaacctcgtcgtgcttttatcgaagaaaatgcactaaaagcagaaaatatcgatatctaataacgttttcttgagtcaaacaaaacccgctaattcaataggttagcgggttttttatatctatagtattcgttgtgttttaagctaagatcttcagcatacgacgaagtggctctgcggcaccccataacaactgatcacccactgtaaaggcagaaataaattcaggtcccatattcagtttacgaatacgtcctacaggggtacttaatgtgcccgttacggctgctggggttaattcgcgcattgttaattcacgatcgtttggcactacttttacccaatcattatgttgggcaagcaattgctcaatttcgttaaccggtaaatcttttttcagttttaaggtgaatgcttggctatgacaacgtaatgcacctatacgaacacaaagaccatccacaggaatgatatttgaaccggtgtttaagatcttgttggtttcagcttggcctttccactcttcacggctctggccattttccaattgtttatcaatccaaggaattaagctaccagccagtggaacaccaaattgctctgtcggcatagtaccactgcgagtaaagttagtgactttgcgctcaatatctaaaattgccgaagctggattttctagctctttaaccacttggttatgtaatgcacccatttgtgacaataattcacgcatatgacgcgcaccggcgccggatgcggcttggtaagtggagacactagcccactcaactaaatcgttagcaaaaagtccgcccaaagacatcaacattaagcttacggtgcaattcccccccacaaaggttttaatacctttattgaggctatcttggatatgttgaccattaacgggatcaagaataatcaccgcatcatcattcatgcgtagtgcagatgccgcatcaatccaataaccttgccaacccgcttgacgtagtttgggataaatatcatgggtgtaatcacccccttggcaactgataatgatatcgagtgaggcgagcgtatcaatatcataagcatcttgcagtgtactacgatgattgccataagcaggtgctgcttcacctaattgagaagtggtgaagaaaacagggtttatcccatcaaaatcacgttcttcaaccattctttgcattaaaacggagccgaccataccacgccagcccacaaaaccaacatttttcattgtaattaccctgtctttgtctgtaggaatagtgagagacttcacactaacctgacaaaatatagagagaggtgcaagtgaatttattgattatttaccaaagaattagaagtgtttctaatagtctgcatagagttaacaaaaggaaactacagaacgaacaaatatcacgaatttgttaaaaataatgcgccattaattaagtgaacattaagcataaatcatttataaaaaagattaagatgattccgttatgacttatttcatttttttgataaataaatttatattcttgtctaataaacaatgataaaaatagaaaaatgtaaaatagtgtaatatataagaaaaacgtatttacttagagatagctccaagctttatactgaaatccgtcattagtgagatgacataaattcataaataaaaaataacgatgaatgtacttcattttatctgatttttattttatctagataaaagctttagggggcgcaagatggatttatcaacctactttccattatcaacctattattcatatttaaagcggtttgtactgtctcctaccacaatgggaactattgcgccttcatcacgttggttatgttatgaaatgctcaataaattaaattggcaacaagatatccaaatcgccgaattaggtgcgggtactggggtgattacgcaacagatcttaaaacgtatgtcatcaaactcggtattagatgtttttgagatagagccagcattcgctaatgagctgaataagattaatgatccccgtttaaccatctatacagcgtcggctgaaaagttagatagtcattataatatgattatttctgggttgcctttcttgtctattaacagaaggttagggttaaaaatcttaaagcgggtacatagcgaattattaaaaacccaaggttgttttgtgttgtttcaatataccactcgatatgaaaaaacattatctcgttattttcatttagagaaaaaacgtgtgatgttaaatgtaccgccagcttgggtttattattgcacgccaaaaatagtgtaataacattacatcttaaattgtcattattgtgactctctatttttacgcaaatattgtgtatcaataaaagtatgtatcttattttttaatttaaatagtaagataaaaaagacgaaaaaatgtatctatagtctgataaatatcgaaatatcatgccgcaatgtcatgtaaagtcgcctaagtcatgattttgaaaaactcacctatcataattgggtgtataatcgttgatgttttttgagattaacagataaatagcaatttagggacttaaaatggcaatcgaccttggtcatctggtgacagaaagtcgcaatcatcacagtgaacatattgatacactttcaacacttgaaatgctaaaagtcattaataatgaagataaaaaagtgccttttgcggttgaagccacattaccccatattgcacggctggtggataaggtcgtaacagcattttctcaaggtggtcgattaatttattgcggtgcaggtacttctggtcgtttgggaattttagatgccagtgaatgtcctccaacctatggaaccccccatgatatggtgattggcttaattgccgggggacacaaagccattttacaagcggttgaaaatgcagaagataatgtccaattgggggcagaggatttacaccagcttaattttaatgctaaggatgtgctagttgggattgcagccagtggtcgaacgccttatgtgattggcgcattagaatatgcacgctcactaggtgcggtgaccggggcaattagttgtaatcctgatagtcccatagcgcaacgtgccgatattgctattacgccgattgtggggcctgaagtggtaactggctcatcacgtatgaaagcaggcacggcacaaaaactggtattaaatatgataaccacaggtgccatgataaagatgggtaaagtatttggtaatttaatggtagatgttgaagccactaatgccaaattaattgaacgccaaattcgtattgtgatgcaagcaacagagtgtgatcgagctactgctgaacaagcactagcacaatgccaacgtcattgtaaaacagcgattttgatgattttagccggcgtaaatgcacaacaagcaacacagttgttggcgcaaaataaagggtttattagacaagctctagctaaatgatagcgttacagatttgcttttaaacggaatgataaatgctatcttcgcattggtgagtgatccgtcgcaatgttaatcagcgaaaattcaatatgtcactaccttgtcatatttggtatgaaatattgaaaggggcctttattttatgtccatttttatagaaataagcgcaatatgaattgtccacttcctctaaaataagacagctataattagaatttctgtctgccccagccattacagaggttatgataaaaaagcccgttttactgaaactcaaatcgttaatattttaaaactcgctgattctggaatgaaagtggacgatatttgccgccaaaatgggatcagcaacgctacttattataattcgaaatcaaagtatggtggcatggaagctaatgatgttaaacgattaaaagaacttgaagatgagaacgcgaaaccgaaaaagttctttgccgaagttagtcttgaaaaccatgcaatgaaggagcttttcgcaaaaagggttggtagtggctgaaaaaagatcctgtgctcaatcattaaaagaggcaggtttatcagtcattaaggcctgtaagctgacgtcgttgtcacgagccacattttatcgtcagcaaatagattggcgtaaaaaagaccattggtgatagaaaaaatcccgaatattcaatgggtataggattttatgcacgacagtttatattgcggtaagcggttcagaaccctcaatattattgatgaggtaacgcgtgaatgcttggcgattgaggttgatacatcattaccggctaaacgtgttatcaggatgcttgaactaatctcgattaatttattgaattactgcgaaactcaccacgttgagctctcatattcaacccggcaagccaccgaaaaatggttttatcgaacgatttaatggctcatttcgccgcgaatttttaaatgtgtatttatttgaatcattaattcaggtacgagaaatggtgtggttttggtagcaagattataaccaaaatcgaacttacgaaagtttaaaccacctcccaccgaggtctatcgtaaacagttagaaaactctaagttggagtgtctcaattaaagggagagtggacaaccaaaagtggacgccgaaaaacgttgtccactttatggcgtattatgagtgaaagatattatgcttatggacaatgtgctccaactcatttcgctctattgttctaactcctgttaatctagcctcatcatatccatcaggtgtaaagtctgtcgtagttatacaaatcatttctttagcacctcttgtatttgcgaaactgtgaagcctttgaataggggtggaaccaattttactctttgtatacctcttgcactgcacaataaccaagtcaccatttttgttattacatctgacatcaacaccacggtcacctgctcgccctgaaacgacaacattggagtatccttctaactccagaattttagctacaaacacttcgaactcataaggatctaactctaataagttttgtatattgcttggtattttggggataggtcgtttagtgaagaattttcctccatctacaggctctgcataaagatttaaaagagaatggattgagtcttcaccatccttcaaaatatcttctaaaattgctctagttccattttctacgaattctgcaactttgagcaagaattgatcaaatgtaaatttgtcacgatttaacagaagttcttcaatcacatatgggatataaagtgagaccctttctatatatggtacattgaagatttcatctgaatatggactagttgccctcggaagatattgaccagctgtactttcttggcaaactctacgaaatgctctttcaactaaatgtctattttttggtaggtttaattcatgtagtcccagattatttaatttagaaaaaaagcttcttttccatgcctgttcgctaaaagatccagctaatttatcttgaagtgaaacagagcacctatatgctaactcgtctaagtcataatcgtttacataacatcgtctttcatcataagaaagctttatgaacgttagaatcaaatcactactaaaagcatagtgcgcactctgttgtattctcatagaaggatcgttattagaaagatctatcgtgagcaatggttcaaagccattctttctcgccagtaatttcaacctattgaagttagctatccattcatttgcaggaacgggcctaaagtaaagaactaggaatttagactcacctaatactgtataagcatgattaaatagttcacttatatcatcccaccactgctcatattctcttttttccggtctctctggggagttacttacaataacttctttagctaaacgcagttcatcaatttttaaatcataacctagccaagggtggtaaagttgtgctctttcaaagtatgcgcttccatcatgccatggaggatcggttatcactaagtcaatcgtttctggcttaatttttgataaaaactctctgtaatcagagtttccaaatttaatttttgagaagttatttaatgagtagccatatatagtattgatccgatttttaaattgtttctcaaatatgttgagtatgttcgtttctctcaactgtactttaggacaatgcaaatcctgacttttacttctgtaatctttatatttcatattgggaattacagataagaaggtacattttaaatactctttagaagcctcactacagtctaagttcaatatttcgttccaaagaatagttgatacgatttgacttcttttcggaaataaatttttgtaatccaaaaaatcttttcctaggtttatcctagagttttcgatgaatctaaaatcaaaaaaatctatgtccattttttcgatttcatccatcacactctgatcatattcgtcgaaaaacttctctttggcaccacaatttttacatttgaatttacccctaaaagttatattttctccattctttccaagtctttcatgatgtgtgatagttttataatttagtggcgttctgtcgtaacaaagagaatctatagttattttttcaccgcaactgcacatacttctgtagtagtattcagtttgtggtctagctatctttataagctgttcaaaggtggatattagttcatttttgtctggcaaattaaaaggtaactgaaccattttgtacgtatatggctcatactcgttggcatacacattccgattcattagcgaagccgcgtatgcaaagcttcctgacccagaaaacgggtcgcatactgtatcctcggcctctgttagtatatcaattacactttttgcgtggtttattgcttttcttccttgaaatggaaacaattgatctgcatgaggtggtttatgattaatatcagatagtgttaaaactagtctatctattttttctctgactgctttttgtttttcttttgaaaaaagccaatacatttatattatccttgatatgtctttttctattttttcatcaataccagtaacttcatttactagataaattttaataaattcagcaaacctatcgaagtatgttccttcagatagttgaattagagcatcatctaaagtgatttttctctgattctttaatttagaagcacttttcctacaaattacaattaagtctccatctaatgtttttcctggagatgtaacagctttcatggatctacgttgtttaggtatcgcgattacatcttcaaaaacgcaatttgattcgataattgaccgctttatagttttccagtgcttgatattcttgtctaaatagaaaaaagcaaagtaaccatcatcttttaatccttttaatatagatttaaaagaattcatcattcttatatcgtaatcattagagtcaatatttcgacctacagcatttgtttttacaatttcgaatttccataaatcttttgttcttgtttcatcaattattgaccaataaaaatcagaatattctaaataaggcgcatgatcagcatatggcggatctgtgattataagatcaacggtgctatcttcaagagcaatgtctattaatctatcagctggaacattaaatgtttcatgagtacattgggtttcggccaattccttttcggaccaatttaaaaaatcaataaaagctttatttcttttatttaaagcgactatcgggtttcttgatgtaagttcttttttaggtcgccagtaaggccattgtgaacttgcctttttatcacttaatcgtagtaaaggaagcatagaggataaaaaaatctttaagaaatttctttcactctcagtaaactctgtttttcgaatgtataagagacagtgattaataaatgacttatttctattagtaaaaaaatcagaagctttcacaccattatgaacagctattcttgtattttctacaaactcaatgcgttcaaagtctaaagggttagttatatttagttcatcatctttacatgagtatataatattgtcgcaaatgagaacctttccttttagattgttatttacgataggttttattttcacctcacaattaactaatctaaaatttccacctacatagctaccttcaacattgaaagactccctttcaacacataatccatctgtagttttatatatctctatagcataacttctccactcttcaaaagctgatgataatataccctttaaatgagtagatgaatctgtcgttgaaagtatggtacttactaataagttggatatagggctgagatcggatccgatagttcttctgtttaacttcaaggctgcgatcaatgatgtccctgatcccataaatggatctactactaaatctcctgggttacttaatttttcaactaataactcggttatattgattggttttcttgcccaataaggatggattaatcctgcgggataatcatgatttggcttagtcgccttcagtaaattttttaaatcttttaaatctttcattttgatattaggaataagtattctgttacgtttttatgtctcgcttgtccctgccccgtatgctgaagagaaaactctttaacttccatttgtaaccccttcttttttgtatactcaaagaaaaactgactatcaacaattgacgagcaagcatagctaatagctaacttagcgtttgcattcatacagatatcaatgagtttttcaaaggcttttttagctagagcttttttaccaaaatctgaagtaatacgatcttctctataacgaccaactgttgttgaacctatacgcttattaaaggtcagcattggatagtcatataaaacaaaagtatctaatacgtggtagtatcgagaatagtgctctttaaaatatggtggatcagcatatacaattgtttcggaatcaagagtaatttcatctagagcactcttaaattcttgttgtaaaactttagcttctgtcgtcaataaactggagtcaagtgctattaaccttttaattgtttcattaattattgagatagaacgtttttttattaagttgattgcagacttataactatgtggtttaagaaattgtgctagatgggttgtactcgacacgcaataagtcattgcagatgttacacaagccaatatgtgttttttgtcttcgggagcacaattttcagcaaactctctcaagaaatctatctccgcacactgataaattccaaagtaagtatttcggtagtaagccagaaataatgtccatttttcagagttctttagattctcgattgcttcggcatccccaccacaaagtaatgcactatctacgaacgttttataagattcccagttaaattgctcatgttcgatctggttgtagaaagagagctctgtaaagtattcaggaagataattttctcgatcacccgaaaatagagacttattagttaccttacttaattcactaattattgaagataaattaccactagtagggttgagtagtgaagagagaagtgtagctgagtaaggctgtatatcattagcagttactgcatagcctctatgctgagcttcaaacgctacgacgccggagccagcaaacaggtctatgaatttgttttgattaggaaagtacctaacgattgtatcaagaatattattgactattcttgattttccacccaaatattgcattgtcaaaggtctttgagcgacttgattatgcaacttagggatgttttcttcggttaacataagatacctgtatataaaaacagttattgaggttaagatacatcagaggatagtagaaatctatcgatacccactatttttttgtttggttatccagctatcaatgtcactttttctaaagcgccaactacctccgactttaaatcctggtaatttaccctctgctgtcaacctgtatgtagtcttttcagctagcttgagataatcagccagctctttaagtgtgagtatttcatcagacatagtaacccctcaattttctaggaagcgagaatatgagaaaattgaggagttaacaagaaaatagttcatattagttgaaactgaataaccggtatggtgtagaaagcactggctattgagatgcttttaaatcacgttgttaatgatcatgcaaaactccaccaaattaggaaggaaagatcgtgtaaaaatgatccacctgatagctctgctacatttcttgtttttgcaagggataatttggaatgcttcgtatggaaaccaaccatcaccaaagtctatgaaagtctggacttcggctgacaattagttttttctagttgtagccggaggtcagatatgatgaatattaaagctaaacgagatattgcacataaaacaaaaatcttaaatcatgcccgcgagagcaaaaatattgctaaaacttgtcgtcattttgggatcagtagagaaactttttatacttggaaaagagcttatgaacgagatggcgaaaaaggattaatcaacaataaaccctgtcctgaaaatccaaccagaagagttgcaaaacatatcgaagagctggttatttatctgcgtaatctgcgtaatctgcgtaatctgcgtaatctgcgtaatctgcgtaatctgcgtaatctgcgtaatctgcgtaatctgcgtaatctgcgtaatctgcgtacgacttaccattttggcccccagcgcatcgcttggtatcttctgcggtttcataacatcaaaatatcacgctctggctgctactatgtattactaagaaacaaattaaaccaacttccccaaaatcagcgaagtcgctctaaaccactatttaaacgttatcagaaacaagtgcccgggcaccatgttcaagttgatgtgaagttcctattttttaatacgccagatggtcaacgaattaaacgttttcaatatacggcgattgatgatgcgacacggatcagagcacttaaaatttatgaaaagcacaatcaggctaatgccattgattttattaattatgttgtaaataaatttccctttagaatcaaaatgattagaacggataatggtcacgaattccaatcaaaatttaattggcatattcatgatctcgggatggagcatgtttatatcaagcctgcaacccccagattgaatggaaaggtagagcgttctcatttaacagataaacaagagttttatcaattaatcgattataaggatgatgtcgatttacatgaaaaattagctgaatgggaggctttttataattgtcatcgccctcactcagcgcatgctggtaaaacaccatatgaagtgttaaaaaataagcttggtctttaagactaaacgtcagccgaggttctgagtgacacaatcagctaaccacatgaacaaatgagtttaatcattacaaagaagctagaattctcagaatgggtaaaattatttacgtatataaagatgacaaacgccttattagatcgattagtccatcactgccacatccttgaaacgagtaacgaatcttatcgttttaaataccgagattaagattattttttagatattaggcggtggattttttgaagatcattgacagatacatcatcaacagtacgaaattgaggtaattgatttcgctttttttcagcaatagggtcaataccttttctaataccagctcttagttgtaaggtttgtagttttgcatcgctaaggggccgcccttcaggcactcttccatatctgccaagtgttagctcttctctttccattaatggtatagcgaagaacccggaaagcgctacctttcttggttattcgaaagtaaagaccagtatctactttatactttccaacctttccttctctcaacttgtcttttaattgtgcatcattcataagcgtaaaaatggtgacagataagaagtaacgtatcattactttgttcgcctgccaccatttagatgatatcttgtcaccgttcttgaaatcttatgcaatttaattgctgataaaccctctttataagcagtaattttgagttcttctagtgtcttgtagaatgttactcaatattctggatctgctctcgcatctgttcaattaatacttttaattcaatagcggaattggtgacatccgtattaattgatttggatgctagtgtattggattcacggttaaactcctgcatcataaaatcaaggcgacggccgacagcctcttttttactgagaattttgcgtgtttctttaacgtgggcatctaatctatcaagctcttcagcgacatctaagcgttgcgctaacatcactaattcttgctctaaacgattattatcaacttgaacttgtgcttcttctaatttgctggttaagcgctcacgttgccattggagaatttctggcatctgtgctcttacttttacgacctcagcacttacggcatctaaacgttgctcaatcagcgttttgagtgcttggccttcagcttctcgacttgcaataaaggcatcgatagctacatcaagctctgctaatagttcgctaccaatggcatctaaatcttgctcttgggctgagataaccccaggccaacgtaaaatatcaaatgggctgatagtaccttcatgactttggctttttacccagttagcagaaacaatcagttgccttgctaaattttcatccaaagtcagttcaccttgtgagtgagcattgagttcaaaacgcaagttacattctattttaccgcgtgttaagcgattacgtagacgttcacgaataacaggctctaaactacgtaattgctcaggtaaacggatatatgtttcaaggtaacgttgattaacggaacgcagttcccatgcggcgctaccccactcttttttgatatctcgacgagcgaaagcggtcatactacggatcataatagggtctcaatattgtaaatgatgtaacgattataaccctaggtatcaacacaaggataggcataagccgttttaggtcgtataatgcgcccccaatatgtcagagaaagcggagataacaccatgcgtccagcagacagacaagcagaccaagtacgtccgattaccattactcgccactatacaaaacatgctgaaggttctgtattagttgaatttggtgataccaaagtcttgtgtaatgccactgtagaagagggtgtacctcgttttcttaaaggacaagggcaaggctgggtgactgcagaatatggtatgcttcctcgcgccactaacagtcgtaatgctcgtgaagccgctcgcggtaaacaaactggccgcacaatggaaatccaacgtttaatcgctcgctcactacgcgccgcagtggatttaaaggccttgggtgaatttactatcacggttgattgtgatgttattcaagccgatggggggactcgcaccgcctctatttctggtgcttgtgtcgcgttagtggatgctttaaataaaatggttacagaaggtaagctgaaaaagagccctcttaaatcaatggtagccgctgtttctgtgggtatcgttgatggtcaaccattatgcgatttggaatatgttgaagattccgcagccgaaacggatatgaatgtggtgatgatcgatgatggccgtatgattgaagtacagggtacggcagaaggtgcaccatttagtcatgaagagttacttgctttactcgcccttgcgaaagggggattagaaaagatatttgaagcgcaaaaagaggcgctaaagcaatagattctattttttaaggcgactgaaaagtcgctttttttatgtctaaaatctgtcattaagcaatcttaataggagaaaaaaatgaaagcctaccagcgccactttatcgaacttgcattagcaaaaaatgtattaaaatttggtgagtttacgctgaaatcaggtcgtgttagtccttatttttttaatgcaggtttatttaatactgggcgtgacttggctttattgggacagttttatgcacaaacattaatagataatcatgtgccttgtgatgtgctgtttggaccggcttataaaggtattcccatcgcgacaacgaccgcagtggccttagttgaacatcatgatatggatgttccttactgctttaatcgtaaagaagctaaagatcatggtgaaggagggacattagtcggcagtccattaacagggaatgtggtgattgttgatgatgttattaccgctggaacggctattcgtgaatcgatggaaataatcaaacaacatgatgcgacgctgtcaggggtattgcttagtttagatagacaagaaaaagggcgtggttcgctttctgcaatacaagaattagagcgcgattatcaatgccaagtttattcaattattactttggatgatttaattagctacttaactgaaagtgagacattatcggcacatttgccagcagtaaaagcctatcgtgaacgttatggcattaattaaaaaagcaaaaatacaataaaatcgctcaatagctgtaaaaaaaagccctcgcccaataatgggcggggtgagtagtacaatgaattttctgcgataattatcacagatattgaaagataaaaaggacttttacagtagggacaaggcgcgttgccactgtcacagattggggatcgcttagtgccattcccagtaaatctatttagatactctgatatcaatagagcgcatgttaacacaaataagaaaaaaacggcatatatgtcattttcaaattattgagttaagtcacgagtccactctttcattgttacttgctcactgtaattgtgcctgaattaatggccaacgtgcttcaaattcctgtgtaggatgataacgaaattccgtacgtacaaaacgtgctagcataccttcacaaaacgcaagcagttgtgaagcgagtaatgcttcatcatgtaaaaaggcacttccttcgcgaattttacgctctttaatcacttggcgaagttgtacttcaattcgctcatacaattggttaatgcgcccttgtaatctatcttgctcaaacattaatgcgtgtccggtaagaatgcgagatagcccagggtttttctctgcaaagccaaggatcaagataagaataaggcgaatgcgcgcgatagtttctttctcatcttttaaaatcaggttgatacgcgaaactaagctatcttcgataaactcaattaggctatcaaacatctttgttttactggggaaatgtcgataaagtgctgcttcagataccccaacggtagccgctaatttggctgtagtaatacgttgactaccatcactagactccaacatttgagcgagcgattgtagtatttcatcccgtctatttctgcgtttctttttggtttctttttcttctgccatgactgataaggcccctgctaaaagcaaaacaaatcagtaaacctttgcactaaataaaaacgttagtgcaaagggagtgatatcgtcattgatattaaaataaatgcaagacgtcgtgcttattggcgaccagagtgtccaaaaccgcctgtaccacgctctgttgccgtaaaatcttctacaatattaaattctgcttgaacaacaggtacgataaccatctgggcaatacgttcgccgggttcaatagtgaacgcttgttgaccacgattccataccgataccatcagttgaccttgataatcagagtcaattaatcccactaagttaccgagtaccaccccatgtttatggcctaggcctgagcgaggaagcaccattgccgctaacccttcatcagcaatatgtacagcaagacctgtaggtaacagctcagtttgtcctggtgctaataccagtggagcatcaaggcaagcacgtaaatctaaaccagcagagcctgttgttgcatacgcagggagtggatactcttgtccaattcgtggatcaaggattttaacgtcaatttttttcatcataatgtttggctatctcgtcaagtaggcgatgactcagttgcgttttactactatgtggtaaacgcgtttctccatttgcccagataaggtgtaatgcgttgttatcactattaaaaccagcatcttttagtgatacatcattagcacagattaaatcgagttgtttttgttctcgtttacggcgggcatattcttccacattctgggtttcggctgcaaatccgacaacaaatgggcgatgctcaaccatttttccgacactggcaacaatatcggggttttttatcatagttatcgttacttcatcaccttgttttttaattttttcaggggcaacctgtttggctcgataatcggcaacggcagcacaaccaataaaaatatcttgggatggcgcaatattcatcacttgttgatacatctcttgggcactttcgacgtcgatacgtttaacacaagcaggtgtcggcaatgtgacagggccggcaatgagtgtcacttctgctccccgttgagcggccgcttgcgcaatagcaaagcccatttttcctgagctatggttgctgataaagcgtactggatctaaggcttcacgtgttgggcctgcggtaatggtaatttttttacctttaaaatcgtgttgaattgcaaattgttgctctgctaatgccaccaattcaagaggatctaacattctaccgggtccaacatcaccacaggcttggctaccagagtcaggcccccagataagacaacctcgttgtgccaaagccgttaaattttcttgtgtaatcgtcgcacgatacatttgttgattcatcgctggggcaatcgcaataggtgctgcactggctaaacagagtgtggttaacagatcgtttgccatccccatgcgtaaacgagcaattaaatctgcggtagcaggggctaataaaatcagatcagcccatttccctagttcgatatgtcccattgcggcttctgcggcaggatcaagcaaatcatccgcaacagggaagcctgataccgcttgtagcgataacggggtgacaaaggcatgtgctgcaggcgtcataacgacgcgcacaatagcgcctttatcacgtaaacgacggactagctcaggcgctttataggccgcaataccaccactgatacccagaataatctttttgtcgtgaagtgtagtcatgatgaaatgcctaattgcataaataaatgtccataattttaccacaagctaagccagagttaggcattctatgtaatacgatgttttataaaataaattattgtgtattacctcgcacaaattttatctgtggctttttcattcaacttgtacagtttatagtaagttaactgtatataaaaacagttgttttgtgataaatattgcatgaaagataaaattaaataattgaaagataaaataacaacataggccaattataacgtattgatgtttaaatgcttggcgaaaagggagagcacaaagaatggaaaacgcaaccatagagacactcttaccgagagaaaaactgctgttgcatggtgtagaatcgttaacggatgcagagttattggccatttttttacgtacaggcacctatgaaaaatcggtattagaattagccgactttttacttagaaagtgtggttctctctatcatgtgatcaatgcggattatgaaacattaggctgttttaaggggataggcgtgggtaaatttacccaattacaagccattaatgagatggctcaacgctttattaaaacaaagtttatgcataaaaatatcctctcctcatccgcagaaaccaaaagttatttgcaaaaacgacttaattggcgtgatagagaagtatttgtcgtgctatttttagataaccaaaaccaaatgatcgattgtgaggaaatgtttaaaggaacggtggatcgtgttgaagttcaccccagagaaattattcgccagtcgattaaaaagaacgcagcatcgattattttagcccataaccatccttcaggtctgtctgagccaagtcttgccgataagcagataacagaaaaaatttttacagcctgtcaattagtcggtataaaagtgcttgatcaccttgtggtagggcatgataactgtgtttcttttgctgaacggggttggttatagccaatattttttaaaattattgacaatctttattgtacgggtcttgagcgttgaggccattgggcgtatactacgccacctttgaggatcttgggtttggcgagaagagcctatctcagcaagttttttctgaggtgtttacacagtttttcaatcgttaaaagttgctgagatgggctccaaagcctgacgaggcggtcaaacctgatactaaagctcgagctgattagatttttggagaatagacatgtcccgagtctgccaagttaccggcaagcgtcctgtgagtggaaacaaccgctctcacgcattaaacgcgactaaacgccgttttctgccaaacctgcactctcaccgtttctgggttgagtctgagaaacgtttcgtaactctgcgtgtatctgctaaaggtatgcgtgtgatcgataagaaaggcatcgaatctgtattagcagatttacgtgcccgtggtgagaagtactaaggagctgaaaaatggctaaaggtattcgcgagaaaattaaactcgtttcttctgctggtacaggtcacttctataccactacgaagaacaaacgcactatgccagaaaaactggaaatgaaaaaattcgatccagttgttcgtcagcatgtgacttataaagaagctaaaattaaataattttagttctctgaaaaaaaacccgaccttagcgtcgggttttttgttatctggcttgcgctaagtataacaaagtaaagctattatgatctttattgactctttcgttatactagtgccctttttatctatcgagtgaatagttgcagatgagtaaatcggtgttatctatcttacatacagagtcgtcttgtggttggggtggtcaagaaatccgcattttgacagaatctcaaggcatggtgcaaagagggcaccatgtgacactggtttgctgtccaaactcaaaaattgccaaagcagcccctgactatggtattgaggttgtcacattaccgattgaaaaaaaacgcggatctgcactgatggcattgcgtaattggttaaaagtccatcgtcagcaatttgatgtgattaatacccatagctcgacagatgcttggttagttgcgctatcttgtgcttcattacgccactctcccgccatagtacgtactcgccatgtatctaccgatgtatcacgttcactgcccacgcgttggctctatctgtcttcaagtgcccatattgtcactactggtgaaaaattacgccaaaccttacatcaatataatcgttttccgcttagtcaaatgacctcagttcctacggggatcgatttagaaaaattctcgccacaaaataaacagcaagcacgagaaaaaataggtgtgcctaataaacctacattagggattgtggcaacaatgcgggtatggaaaggacataaatacctaatagaagcatggaaaacattgcatctgcaatttcctgactggcaactacttctcgtcggagatggcccacaacgtaaaaatttacaaccaatggttaaacttgcagggttagaagagagcgtctttttcttaggcaaccgcaatgatgtaccggattgcttaaatgcaatggatttatttgccttaccctcttttggtaacgaaggggtgccacaaggtattatgcaagcgatggcttgcggattaccggtggtatcaaccacagtaggtgcaattagtgaagcggtgattgatggtaaaactggttttacattggcacctcaagtacaagaaaccctaatcaattaccttgctaaattaatggcctctgatgagttacgtcaacaaatggggcaagcgtcattagcccatgccaaagctcagtttggtttagataacatgctagataaaatggaaaaaatatttattaacgccattagccttaaagataaatcacgataattgatatcctataaagtcgctaagggctaattatcctgtatctgatgttatattttcattctgtttatgaatatttgtaatgctttttagtgtatagtctggaaagtaaatgtatcatttaaactaaataaaaagtgtatggatccaaaaaacatattggttatcgcaattgcgcgttttggtgatacgttactgatcacgccggtgatccacgcactaaaagagcgttggccgaatgcccgtattcatgtattggcgcataaacgcagtgcctgcatcttgcagcacaatcctgatatttttagtgttaagcctttctcgaaaaagcgcgcccgttggcgaggatggttaccccataaaccttatgatttagctttggtatatggaaatgatcattcattagtgcagtatgcccgccgtcaatcacaacatgtagtggcttttgctgaaaataaccaaaagcaatcagacataacatgggtggcttaccctaaagagttaatggtggcacaaaaagagcgtgctttattaattaatgcgttaggaatttacccaaccaattggcaattacgctactctattagttcagaagaaaagcaatttgcccaacagtttatagagagtaatgcattaattaataagcacattattggcttacaattacaaagttttcctgccaaagcttaccgagattggcctatagaacactttttgcagttagccaaacagataatgactcatgacgagcaggcctattttctgttattaggtgggaaagagagccaacaagtcgccattgagctggcgaaaaaaataggtactgagcattgtttggcattagcagggcaagtctctatgcgcgaaaatgctgccattatggcgcatttgtcgctctatatcggggttgatacagggccgacgcatttagctggcgcgttaggtattccgatggtagctatgtatcacagttatcatcccggatgttatttagcgccattacaacattcatgttgtcatattatccaacatcctattgcgttagccgatgcaagtcgtgaagatagtatgtctgatatttctgtcgccaatgtttggcatgccgttagcgatattttaaatggaataaaggtgaaacagtaactcatgaagattggcttaattgatgtcacaatcacaatgtcttatggtgggatccaaaccgcagtatgggagcttgccaaacagttacatgatgcgggacatgaggtacatctttatgggggcaatggtgatgtcaggcatgaactagcaggccgacaaattcatattcatacctatccttatacaccaagagagaaagttatcgatctcggtggtcgttttcgtcgtattgttgaacgttatagttttgctcgctatgctaaacaagatgttattcgacaaaattttgattgggttattttaactaagccgtttgatttcttttggcctgcaatgatgcccaaatcttgctcgacacgtttttgttatatgagtggtggcaccagcttttttaaaggcgatcgtaaactggcgaaaaaaatctctgcctgggttgcgtgtagccattttaatgcttggcaaattcagcaacattttaaacaatttcctgcggttatctataatggtgttgatatggcaaagtttaagcctatgacaacatctttgcgccaacagctcggggtgagtgatcctacgtttttattggcatttgcggggcgtgtagtcggttggaaaggcttaagtgttgctattgatgcaatagcccaattgcgagatgaagacgttaagttactgatcatcggcgcgggtgatgcgctggaacaattaaaaaataaagcgatggtaaaaggtgttgctgaacaagttatttttcatcaacctgttgagcatgcaatgttacctgagttttatgccgcttgtgatgcaggggttttcccgagtatcggcgatgaagcatttgggatcaccattgcagaagcaatggcatgcggaaaaccggtgattgccagctatatcggcggtattcctgaggtggtaggcaatgagcaaagtgcaggattattggtaaccccaggtgatgtaaccgcgatggtgaaagccatcaaccatcttcgggcattgccggatagaggtaaagcaatgggtgaaaatgcacgccaacgcattgcttctcactatacttggcaacattcagcacaacgattactacaggcattaaaaacagaatgatgaaaatcgcctatcttgatccttatcccgttcccgatttgcgtgtggcttcattgcaaatattgcaaaacgttgatgcgtttgcccgtgccggtgcacaagtgacgctagtcacccccaaaggacagtatcgagatagcgatattctcgggcgtgatattcatagcaatgcgcagttaattgcgctaagagatatcagacgtaaatggtattttccctttaattcgcaaaagctattttcattacaaattgcacgttggttaaaacaacaccctgttgatgcactatttacgcgtaatttaaaactggcctgctatctggctgagaaccatgcagatattccgctttttttcgaaagccatgagatttttgcgcaatcttttgcagagtcgcactcttttgaaacgaaaaaaaatcgcctgaaataccataaactgctaaaaatggagaagttggtatacagtcgcgcaacggcagtatttgtgctgacctcgctgttaagggacgatattatttcgcaatatcaagtaaccacgcctattactattgtacccgatggggtggatttatatgccgcagatagcaacaaagatagccatagagatataaccgctacgaccaataatgtaacagaggtactttatctaggtagtttgcataaatggaaagggatccccaccatgatgcgagcgatgaaatatctggataacgctagactgaatattgctggtggaacggctgagcaaattaaagggctacaattgcttgctaaggagatggatgtaaaagagaaagttaactttcttggttttatcgatcctaaacaacgctttcaggcgattgctcgacatgatatttgtgtgttgcctttaaccttaaccagtatcggtagtcgctacacctctccgttaaaactgtttgaatatatggcgatgagaaaaccggtggttatttcagattttccatcaattcgtgatgtggtggatgaaaaagcggtaagttttgctgatagtggtgatgcgcagagttttgcccaacaaattaaattactaagagaagagccacaacgtaccagtgagaaaatcaatcacgcccgctcattagttgaaaattattacaactgggataaacgggcagagacgattttacataccatcaataaactgattagctaacggatgtatcttcttgggtcggtgttgctgagggctgatttaataatgaatagcgcaatgctaacattaaccctaataaaatacccacttgattaatataggcattttcaaataatccacgtagtacataaacccctaaaaacgacattaataacaccagcgctgcttggcgagtaatcccctgatttttgcggatcaattgaataccctgagcgataaaagacgcgcaaaaatagagtagacttattaaccccaaaataccgccggcaaaccagaaagctaaaaatacattatggggaccaatggattttttaaatacccagtttttatgctgttttacttgctgattataaacattatggtaaagctgattaccataaccatagcctttaataggttgtgctaagatcaaatctaaggctgaaccttgggtaccaccatcaaatcttagtccgctattggtttgcgatagtttatgtttaagtttggcgttaataaattggttattaggtaattgtgttacaccgaaaaagagcgcaacgcagatacccatgctgagtaaagtaaatatccactggcgattaatgattaagataagtaatgtactaatcgctaatgcgacccaagccccgcgtgctaatgtccctaaaattgcaaataaaaataataggctaaccacacttaataaaagccaattaattatcgaatgattttttttcaatgcccataaggccaatataataggaaagaaaaatagtagtgcataagagatttctctatgcgctaattgacttttttttgtaaaaggcaaaatattttgctgatattccaaataatactgcgccaactcctttgccataatcaccaataaccccatggcgaatgacaccatcaccatctttgcaattgccgtaggtgtttctttatacaatacaatgggaaacgcaatggcaaagagcagtaagccatttaaaatcggcttattaatctcttttagactcagtgcgggctctacggaaatcacgactgaatagccaatggcgagcaataagaaaaacagcgcataggcgagattatttttaaaaatctgaccaatagtgcgaaaatcacgcaccagataccaaagtgccgttgcaccaatcaaccccatcactatatttttatagcgagtgatatcgggtaagtagatcaatataatgtaaagtccaataatggataaattccacaaagattttttactatcgtctttaaacaacatcataataagctgccactgtcctttatgttatattgctctagcggtttgtggggatgaatggctcatcatacaataaaaatgatgttatcgctgtatttctcaagtgacaataatggagtgacttgtgccagaattaccagaagttgaaaccagtcgccgaggtattgagcctcatttagtgggcaatatcttacactacgcaatagtgcgtaacagtaaattacgttggcctgtttctgaaaaaatcaaaaccttgctggatgaaccgattttaagtgttaaacggcgcgctaaatatctgttaattgaattaaatcaagggtggatcattgttcatttaggcatgtccggcagtgtacgtatcttgccagaagagcagcctgaagagaaacacgatcatattgatttagtgtttcgtgatggcaaggtactacgctataccgatccgcgtcgtttcggtgcatggctatggtgtgaagatctagccaccagctccgtattagcccatttagggccagagccgctttcggcgcaatttaacgcgcaatatttatatcaacaaagcaaaaataaaaaaatcgccatcaaaccatggctaatggataacaagctggtggtgggtgttggcaatatttatgcgaacgaagcactcttttcatcagggatcatgccagatagaaaagccagtagcttaaccgagcaagagtgtgacgtattggttaatgccattaaaacggtattaactcgctcgatagagcaagggggaaccaccttaaaagattttctacaatctgatggtaaaccaggttattttgcccaagagctatttgtctacgggcgcaaagataaagcgtgcttaatttgtggtcatactattgaaagtattaagcaggggcaacgtagcactttcttttgccgacattgccaacatggtgaaataaccgattaacgcttaccgagtttttgtagcattgctgtagcaaccacttcaggtaaaaaagtcgatacatcgccgtcatgacgcgccacatctttgatcagtgaagaagaaacaaaagagagattttgtgaaggtaacaaaaagacactatcgagatctggggcaaaatgacggttcatattcgccagttgccactcatattcaaaatcagaaaccgagcgtacgccacggatcaaaatggtcgcttgctgttttttagcaaaattcgccattagctcacaaaagccgacaacttccacattcggcaggtgttgggtgacttcttttgctaaagcgacacgctcttctaaactaaacatagggtttttacgggcgctggcagcaatggctaataacaccgtgtcaaacatacccgcagcacgagtgagaatatcaatatgcccataggtgatgggatcaaaggttccagggtagatagctttatttttcatattcacggtttttccggctaagttcccataatgaggcgtatttattaaaggtatactgtgcattaacaaatgccaatattaatccctgttttccatctaaaatacccattctcagtaaccaagttttaaaaaacgcccccagtgtatggctaataatagcgctataacgggtagttttaccctgctgattgcgctcttgtgcccatgctttagcgtattttagctgtttttgttggaactcgattaaatcacgacaagtaagatgcagcagatcccctggtaaagttttaatggttgcaccttgggtttctaatgattcatgaaccaaattatcattatattgatactgttcacgagcataaaggcgggttactttatcgggataccaaccactatgtttcataaaacggcccataaacaggttacggcgagcacaattataaaccacacccggttcaggttgttgtaacacggcttgaatactggcttttaactcaggggtaatacgctcatcactatcaatcataaaaatataatcgcctgtggcgtattgctgtgctaattgtcgctgtttaccaaaccccggccatggagtattgctaaatactttagcccctttttcacgggccaattggcaagttgcatcgtcgctccctgagtctaaaacaataatttcatcagcccattgtaccgagtctaaacatgcttcaataacatccgcaacgtttttactgatcatcacgaccgagaggcgtttactttcactcattagtgactccgtggtggcagatagggagagagtaaggttaataagcgcaataacgccccttgattctcatgaagtacctcaacggcatggtgtccataatagcggcgataatcttcatcattgagtaatgaggcgattgccgtcgccatagagtcactatcagtgacggtaattagcccttcagcttggtctaacttggcacagatatttttaaaattaaaagtataaggccccattaagaccggaatagcatgagctgcggcttctaatgggttatgtccaccgcgctcgactaaactgcctccaacaaaggccagatcagcaataccatatagcaacattaactcccccatagtatcgcctatcaccacttgggtttgtgcatcaggaatagcatcgctactgcgtagggtatatttaaagccggcctcttgggtaagttgctctgcttttgcaaaacgctcaggatggcggggaactaaaatcagcaacagttgaggaaattgtgccagtaattttttatgggtatctaagacaatcgcctcttccccttcatgggtactggtggctatccagacagggcgatgtgctgcccactggcggcgtaatgccactgctttagcggcgagctcaggggtgaccgagatatcaaactttaagctaccggtaatatgcagatgtgagcgttttagccctaaagcaataaaacgttcgccatcttcctgattttgggcagcaattaaggtaatttttctcagcatcgttttgacaaaactacctagtttttgataacccactgctgagcgctctgataagcgagcattagcaataatcaatgggattttgcgacgataaagctgtgagataagatttggccacagctctgtttccatgatgatcaccaatttaggatcaaccgttgtaagaaaacgattaactgagccgggtaaatcataaggaaggtagacatggtacacatcgtcaccaaatgcagagcgtacgcgctctgagcctgttggtgtcatggtggtgacggtaataggtaaatcgggataatggtggcgtaatgcacgaacaagaggtacagcggcaagtgtttcacccactgaaacggagtgcaataaaatgccatgaggcgcgactttgtctcgacaaaagccatagcgctcaccccaccgtttgcgataggcgggtgctttgcggctgcgtaataaaagacgtagccaaatcagaggttgaataaggtaaagaagtacctgatataaacgcaacaacatgctatcaaattcacttatctggacgaaagcctatagtaccacactgtgtaggagaaagtgtgtaaaaacaaatgatatgatgatagaccacgttatttatcatttaacggctttttggtgtactaaaaacagattattcagattatttaagaaattagtgaggaaattttttataatcaaataatagaacggatcaatagggtgcttttggagcgttatgagtaaaaaaatgacattaatacaacgggttctaattataaaactacgccatcatggtgatacgttgttaattacccctgttattaatacgctaaaagcgaattatccaaatgtggaggttgatgttttaattaacaaagaaaccgcacccatgattgagaatttctctgctattgaaaatattttttccttagacaaggcttggaaaaaagagggtaaattagctcggtttcgccatgagtggcggttagttaatcagttaagacatcgacaatatgatgtggtgattaatttagctgatcagtggaatagtgcgcttattacccgctttacaggcgcaaaagtccgtatcggctatgatatttataaacgacaaagtcctgtttggaaaaagtgttttagtgatttaatcccattaggctcagttgataatcgacatattgttgaacaaaatttagcactactacaaccgctgtcattgcaacaaatagatacgcaagtatccatgacatacagccatcaagacaaacaggctgtgatggaaaaattaaaagcttatggtgtattaaccccttatattgtgatccagccgacgtctcggtggttctttaaatgttgggatgagcataaatggtctgaattaatagatactctacaacaacagggacatcaaattgttttaacatcaggaccagactcccgagaaaaagagatggttgataccattattcaaggatgtaagacaaatgatagcgtctctttatcagggcagttatctttaccgcaacttggtgcattgattgataatgctgagttattcattggagttgattcagtaccaatgcatatggcttcagcactaaaaacgccactggtggcactgtttggtccatcaaaattatttcattggtcgccatggcaacatattggcgaagttttatgggcgggaaattatggagaactcccagatcctgatgatgtacataccaacacgcaaacgcgttatttaagtttaattcctgttaaagatgtacttgaagccgtaaggagacaattaaaatgaatacattccgcttggcgatagtacgtcaaaaatatcgaccagacggtggcgctgagcgttttgtttctcgcgcactggaagcgttagataatcaatccgtagagttgaatgtgattacacgctcttggattggcgcggtgcaaccacaatggcatattcatattgttaacccttttaaatggggacggattagccgtgaaaaagggtttgcacaagcagcaagacactgttggcaacaagaaaagtttgatttagtacaaagccatgaacgtattgctggttgtgatatttaccgcgcaggagatggtgtacatcgccgttggttactgcaacgctctcgggttttatcacccttacgaagtaaattactgctaaatagttgttatcatcgttatgtaatgaacgcagaaaaagagatgtatcaatctcctgagctaaaacgggtgatttgcaattcagaaatggtcaaacgtgaggtgatggaagattttggcgttgaaagtgaacgtattagtgtgatttataatgcgattgatcatcagcgttttttccctgccacggctctttatcggcaacaattacgtcagcaatatcatattccggttgagggtaagtgttttatttatgtcggctcagggtttgaacgtaaagggttaagagctgctattgaggcgattagtcatactaatgcttacctgatggtgattggtcaagacaaagagtacaagaaataccaacaattagctcatcgattaaactgtcatcaaaggatcttatttttaggtgtacagaaagacaccttacctttctatcaaatggctgatggactattgttacccactctgtatgatccttttcctaatgttattttagaagctatggcatgtggattaccggtgatcaccagtgatacatgtggtggagcagaatttattgaacaaggtctaaatggatttgtcacagatgcattagatatacccgcaatgatcggtgcaatagagagtattccggccgataacttaggtaataagatgtctaaggctgcacgaaataagatactaccctatacgcctgagaatttgtctcaacaactgatcgagctttaccaaaaggttcttagcctatgaaggaacatatactttttattattgatggattaccgggtggtggcgctgaaaatgtcacgatcaggctttgtcatggcttaagtcaacgtggttatcaagttacattactctcattagcagaaaaatgtgactatgccattcctgcagatattgaactattaattgatgcagatagttaccatggcttattttatcgacaaacagaattaaaacgacgtgccaactcgatggataagacccttcaggcattgtttgcgcgcaaaggcattcctgcgttaattgtctctaacttacataagactgacagaattgttgcactatcaaaacaactggcagataagaatgtatggtattgtattcacggtattttttcacagtcttatttaggcaataaaaaaggtttttcccgctggttaaaacagaagaaaattcaaaaagtctatcagggtaaaaatattattacggtatcaaatgcggcaggacaagatttaatagagaacattaaaattgtccctaatcaattaaaaacaatttataacccatttgatattcaagaaatcagaacattggcatcagaaaataatccctaccaaaagcaggattatttattgcatattggtcgttttcatcaagtaaagcgccatgaccgcttattagaagcgtttgctttagccaatctaccttgtaaattattgattgcaggacagggatcttctgaggtcaccagcaatattaaaaataaaattgttgcactaaatttagaaaataaagtgagcttaattggctttttagccaatccattccctgtgatcaaagatgctaaagcggtggtattaagctctgatagtgaaggcttaggaaatgttttagtcgaatcacttatttgtaatacccctatagtaagtactaattgccttggtgggatcagtgaaattatggagggtgaattagcagattataagtctgaattaaattcagcatccttggctgaaaaaatgcgtttagcttactttaacccgcctaaaattacgcctaatatgtatcaaaaatttgatattgatgaagtgatccgtcagtatatttcattaatttagctatcttattctcaaagaggacttaggtatttttcaatgaaaaaaccagcatttattatcacattagataccgaaggcgataatctttgggaaaatgagcataatattactacgcaaaatacgcattttttaccccgttttcagcaactttgcgaacgttttcaatttaaacccgtttggctaaccaactatgaaatggcaatagatgaagcctatattgagtttgcacaagatgtgatagcccgtaacactggggaaattggtatgcaccttcatgcatggaatagtcccccaattgttgcgttaacggacaatgatctccattatcagccttatttaattgaataccccaaatcgcagatgcgcgataaaattgcctttatgactgacttactggaaaataaactacaaacaaaaatgttaagtcaccgtgctgggcgttgggcatttaatgaaacttatgcgcagctattgattgaatttggttatcaagtcgattgctcagtcacaccaaaagtcgattggcgttttactaaaggtgatccggcacaatcaggcggtacagattacagtaatttcccaagccatgcgtactttatggatgttaatgatatcagcaaagcagggaattcaacgttacttgaagtgccaatgagtattcaatataaacattccccttttatgaataaaattaagcgagggtacgataggctaagaggtaaacgacgctcaccttcagttaattggttacgccctaaagggggaaatgcccaacagatgattgaagtggcacaaaaatctttagcccaaggtcactctcatattgaatttatgttgcactcttcagagtttatgcctggtggaagccctacttttagaacagaacaagatattgatggcttatataatgatttagaaacactatttaatttcttacaagataaagtacagggaatgacattggctgagtattatcaaaataaagtgcaggcaaaataagatgaagttaaagaaattaaaatgggtgcactattttctaaatctctataacccactctttggtaagatgaaaaaaacggcaacattttcatctgatatcaaatttaacagtattgttattttttcaaccacagcgctgggggattttatgtttaataccccagccatcagagcaattcgtgcacattatcctgatgcacatatcacactggtttctagtgtaaaaaataagttgttagtggaaaactatgagcaaatagatagtgtggtgtattgggataataagatcagaaacttgttaccggtggctttacaagttaaaaagtataaacctgagttagcgattattttacattcccatcttccttatgacgtattatttgccgtgatggcaggttgccaatatattttacgcaatacttatgatgttattccagcctggtttagaaagtggcttgtggccgaatatcagccggggaaaggacatatcattcaaactaaacttaatcttatttataatttaggaattgatagtactgatactagaatggagctcccttgtaaaatagaaccattagctcaaagtaaaaataacattgttggttttcagatgggagcatcaacacaagagcgtagatggcctgttggatcttttgtggaattagcgaaaaaattaattgatagtgcgccattattacaaataaagctaataggttcatcgagagagctggaattgccagaagaattttttgctttgttacctgaaagatatcatcaaaatatagaaaatttggtaggtaaaacctcactacctgatctgttaagccaaataaaaaccatggcggtattaatcacgggagatactggcccgctacatttggcaatagcattacaagtacccacagtgagtttatttgtgacggcagacccaacatggacagggccttatcaggataagcatttacatacggtaattagtaaaagagtaaacctattagaatatattgatatgcctatgaaaattattacagttgatgaagtttttgataagataaaaagataagatattaataccttatcttttagagtttattttataaatttgattcttaagtatctttttttgatgcttatttttattgatttatcaaagataaaattaattaagttaattttattaattttatcttttaatttatttactgtatcagaactaagttctgttttatatttatataaatgaattatacaatgcgatatatttaaattgatatatttttcagggaatatctcttgcatagaaagaatagccttagccattaattctattttttctttacttaggttatttgaaagactaccttgatgttttatatagttatataaaatattatcagaatataaaaacttattggataaatttagatattttggaaaaaagaaagcgtcttcataacaaaaaacatcagggaattcaatttttaacattatctctcgtaaaaaaaatttactgcaaaggtgagcctgaaattttttatgaattaaaaattctgatataatttcatctttactttctgttctatattctatttttccttgttcttttattatttgtttttcattaaaaacttcttgtattttagttataaatagatctggttcttctttattaagaatagtaaaaatatctaacatatcaaaatcagagaagaagtcatcaccatctataaatgtaatataatcacctttacataaagaaatagcgtgttttcttgccttaccaacattattaaagaatactttattataatggaatgaaggatgatgatttacatatttttttaaaatattttctgttctatctgttgagttgtcatctataagaagaacttcatagtcatttggatcacaattccttaagctataagaaatggagttaacacatttttctactaaatcctctagattttttatgttaactataatagataaaatcataatggatcctaaaatatactaaaaaataggtaatagttgcacaagtaaaaatatattttctttttacacatgagtgaaagattttagcacatctagtgcctgaatctcaccaatatccccacctgctgcttttaacgacctttgtgccttaccataaccgccgattaatcccggatcggtagggccaaagagggtaatattcggcttatctaaggctgcggttaaatggcttaatccggtatcgacagaaacgacactttgcgctccggcaatcacttgagccacttctgcgagtgacattttgggtaatacatcaacatagtcaaaaccttgagcaaggcgtattgcacgctgatgttcatgctctgcgccccaaggtagtttgatacgtaaacctgaattcgccagtaatgcaattaactctcgccaatgggtctcgggccaatgtttctcatcacgggtagtggcgtgtaagaagactaaataagggcgtttatcaatagcgggtaatgagagaaaatgctgtgctataccatagtccccttgagtggtgggaagtgggtaattaaggctaagggcaaatagctggcggatacgctctaccgcatgcatttttttactgacattgtggcgaatatcatagaaaaaactcgctaaaggctctctagcactgtgacgagaatagccgtgtttagtgcctttcgcatagcgtgtaactaaaaaagcgctttttagtaaaccttgggcatcaatcaccgcatcataatgatgtgcttgtatcgcgtgacgaaattgtgcacgttcagcgcgaataggcgcactaaaccagtttttacgccaacggcgtattgcgacaggaataacggtatcaacagctgggtgccagcttggaatttgcgcaaaaccttcttcaacggcccaatcaaaacagatctcaggatatgctgctcttgcatcagttaatgccggtagggtatgcagtacatcccccatggaagaggttttaacaatcagtacccgcttcatagcgatggctccgtagcgagtaattgctcgagttcgctaaagacttgttccggttgaatgtcgattaagctttggtgataaccttgttcagcatcgcctttacgcactttgtgatagccagtaattaaacgaataacacgagctttatcggataacgggggggtaaagtcgggactacttgggccataaagggcaactaatggacgctctaatgctgcggcgacatgcattaagccagaatcgttactgaccacggctttacaagcggcaatgaggttaacggcttgctcaagagaagtctcaccggccagattaatacaagcagcttgggcatcgggggttaaggcgtgtttgatctcttcccctgcaggcttatctttttgtgaaccgaataagaaaatctgatagccatattcgctaataagtttctgggctaatgtcgcgtagtggtaatgaggccagcgtttagcaggaccaaattccgcccccggacaaaaaccgatagcagggcgctgtgtagataatgaaaagtgcttaagtgtggtagtgatatctttgtcagagacagccagttttggccataataacggctttggtaaatcagcggctgaatgtacctgctgtttatcgtaagcaagcgcaacataacgctctaccattaatggaaatgcggctttatccaatgggcgtaaatcatttaataatccataacgcatttctcctcgccagccagtacgtttaggaatagcggcaaagaacggcactaaagcggatttaaatgagttaggtaaaacataagcatgagtataacctttggcttttagttgtttacctaagcggcgacgctcaccaattgctaaggcaccgtgacctaaaggcatagcaatggcattatcgacctcgggcattttctctaataatggacgacaccaagcgggtgccatcacatcaatagttgccgcaggatgtaacgcttttaatgtacgatataggctttgggacatcatcatatccccaacccaagaaggccctaccacaaaaattttcataaaccgcgattacttatcctgatttaaccattgcatataaagagcaacaccttctgcgaccgttttaaaaggggcgctgtagcctgctttgcgtaaatttgtcagatcagcttgtgtaaaggcttgataacgacctttgagtttctcagggaattcaatatgctcaacagagagatctttatcgttatgataagcgataactgcatcagccacggcttggaacgattctgcgcggccggtaccacaattataaataccggagacattgttgcgccagaaccataaattaaccgcagccacatcccccacataaataaagtcacgttggaaggtttcactaccttcaaataatttgggattttgcccgtcattgacttgtgtatttaaatggaaggcgacactggccatactgcctttatgcccttcacgggggccatacacattgaaataacggaaaccacacaccatagattgtgcttcaggtaaaatttggcgcacatattcatcaaataagaatttagagtagccatagacattaagtggggcttcatattttctttcttcaataaaatgatcagtacggccaccataagtggcagcagaagaggcatataagaaaggaatttggcgatcgaggcaataatgcagtaactctttagaatattgatagttattatccatcatatatttgccatcccattcggtagtagaagagcatgctccttcatggaatacggcatcaatatcaccaaaatcatcaccggctacaatactggcaataaagtcttctttatccatatagtcagcgatattaagatcgacaagattcacaaattttgtgccatcttttaggttatcaaccactaaaatatcggtataaccttcatcatttaatgctttaacaatattgctgccgataaaacctgcaccgccagtgacgataatcatatggctacccctttatataaaatctaaaaattagctctgcaactataataacactgaacagcgtgaacggtagcattcatcatagaagagtagactgaaattcttgaaaatcgcagtgatgattagtgatcttaattacacaaataacattatttatttacatttgtcgtttttaatcgaacaaaagcataaaataagaaacaataatgattatattatagtcaactctagctcttatctcttttcgtctctgccttaggagaaagcatgtctactcactctttctatcaacaaattaatcaacaactcgaacaaacacgtcaagatggcttatttaaaaatgagcggatcatcacttcttcgcaaagtgccgatattgcggttgctgatggtagtcatgttattaacttttgtgccaataactacttaggtttagctaaccacccacaacttattgcagcggcgaaagcgggaatggatagccacggttttggtatggcatcggtacgttttatctgcggaacgcaagatctacataaaacattagaaaagaacatcgctgaatttttgggtatggaagatgccattttgtactcctcttgttttgatgccaatggtgggttatttgaaacactgatgggatctgaagatgcaattatttctgatgcgctaaatcacgcatcgattattgatggtgttcgtttatgtaaagccaagcgttatcgctatgccaataacgatatggcggtgttacgtgcccaacttgaacaggccaaagcagataatgcccgccatattatgattgccaccgatggggtgttctctatggatggggtgattgctgatctaaaaagtatctgtgatttggctgacgaatatggcgcattagtgatggtcgatgactcgcatgcggtgggttttgtcggcacacaagggcgcggtactcatgagtattgtgatgtattagatcgcgtcgatatcatcacaggaacattaggtaaagctttaggtggcgcatcgggtggttataccgcagctcgtaaagaagtggtggagtggttacgtcaacgctctcgtccttatctattctcaaattctttagcccctgcaattgtgagcgcctctattgcagttttagatatgctgaaatcaggggatgaactgcgcgcttgtttatggcgtaacgcagcactttttcgtgaaaaaatgacggcagcaggttttactttggcgggggctgatcacgcgattattcctgtgatgttaggagatgccaaactagcgcaacaatttgcagcacgtttacttgatgaaggtatttatgtcactggctttttctacccagtagtaccacaagggcaagcacgtattcgtacacaaatgtcagcggcacacaccccagaacaaattgaacgtgctattgctgcatttattaaaatcggtaagcaacttaatgtgattgcataaggttctaatatgaaagcattgtcaaaattaaaagcacaacccggtatctggatgaccgatgtacccgtacctgagcttggtcataacgatgtgatgatcaagatccgtaaaactgccatttgtggtacagatgttcatatttataactgggatgagtggtcacaaaaaaccataccggttcccatggtggtcggccatgaatatattggtgagattgttgctattggccaagaggttaaaggttttaatattggtgatcgcgtctcgggggaagggcatattacttgcggtcattgtcgtaattgccgtggtgggcgtacacacttatgccgtaataccattggtgttggcgtaaatcgtcccggttgttttgcggaatatctggttattcccgcttttaatgcatttaaaattcctgacaatattccagatgaactggcggctatttttgatccctttggtaacgcagtacacacggcgttatcttttgatttagtgggggaagatgtactggtttcaggtgcgggacccattggtattatggcggctgcaatctgtaaacatgtgggggcacgccatgtggtgatcaccgatgttaatgaataccgccttgatctggctaaaaaaatgggtgtcacccgtgcagtcaatgttagcaaggaaaatctaacagatgtgatgaaagaattaggtatgaccgaaggctttgatgttggattagaaatgtccggtgcgccaccggcttttcgtaccatgcttagtacgatgaatcatggtggtcgtattgctttactgggtattcctccttcagatatggctattgattggggacaagtcatttttaaaggattatttattaaaggtatttatggtcgtgagatgtttgaaacatggtataagatggcggcgctgatccagtcgggtcttgatctctcaccgattattactcatcaatttcctatcgatgaattccaaaaaggctttgatattatgcgttcaggtcaatcgggcaaagtaattttagattggcagtaggagttataaagcgccctgaacggtgaaagggcgctacctcttttaaataaatacctatattaaggggaaaataggtttgtattatatttgtcgatgaggcttttctattattcctctaacaagattatttgaatttgtaacaactagatattttatttttttactttgaaatattttctttgcatgaagaaaacttttaggatcaccaaaaatagcaatattctttttaatgtgctttttgttttaagttaactatttctgtatatgggtaaggttgttgactttccgccatgtttttctataatccctttcagagcagttttttggccccactggcaacttgtgttgttatgcgcccttaaacaatctacttagagtcccgaggcgagctttagttagcagaccttgggatttgtcttttggggatataataaacaaaacaattagcctagtcctctcaaaaaatagaaattaatatcatcttctttttcttcaagtaacctaatttgatctgaatattttccactaaatatttttatttattcgactttatctttgttgctttctaaatgctgggaagggaattgcttatcttgttcgaaggtcattaattttttagtaagtactttcataagagtactttttttcattgaaataatggcttgttgtgctggctttaaccatgttgcaggttttggctctttagattgctctgttggcggtataacagcgggtggctcttgcaccattgggctgtctggtgaaggggttaacaaaccactgggtgcgactagctgaatatcggcaggtagtagtggtaactgctgttgtaatgcccttacggttgaagggtgggggtgaccaatggcaatggcaaaaccatttttacgcgctaaattaatagcacgattaagctgttgtcgggtttctgcttctgtttgcacattatctaaaaatacatgccggcgtaaagaaggaacgccagccgctttggctgccgtggccgcttgcgtattgcctatagtgacactatcaagaaaatagagatcagaatgattaagggctttgatcactctatccatcgcttgcctatccgatgtcatcgcactccccatatgattattcatacccacagcataaggcacacgattaattgcattttgaataatacgattaatttcagcctgatccatggaaggctttaaggtatctttttctaatggctgtttgctaatgggtgccattggcatatgaataagaatttctcgtccttgggcatgggctttcgtcgccatctctttaccatggggtgagttgggtaatatggcaatagaaacggctgttggcagttgtaagatttggttatcttctttttttcgataaccaaaatcatcaataacaatagccaattttgccgaaaaagcaggtgcactgaatagaaaacttagcaacattaaactaagtgttagcgcgatatttcgttgtaatgtgccaagtaaatgcaaagctacctcccaagccaaggaactgggttgactgcttttccttggcgtctaatttcaaaatagagcgctgaacgctcttgtccaccactgtttcctaccaaggcgataggttgtccagctttgacttgctgaccaacattgactaacgcactttggttatagccataaaggctcatatcccctttgccgtgctcgacgacgaccactaaaccatatccttgtagccagtcggctaacagcacccgaccatccgcaatcgcttttacttcggtgccttgtgctgcggggatcacaattcctttccaacgtaattcacccgagccggaaatagactcaccaaagcggtgtaataaactgcctctaataggccaaatagcctgacctgcaggtttacccaatccgccagtacgggacattaaagagcgttcttcggcggtgggtttataggtcgaaccacgctgttgcgcttcacgttgcttggcggcaatacgagcagcttcccgtgcttcacgctcagctcgcgctttggcttcacgctctgcttgagcaattttatttcttaagcgtatttcattagcacgcatggtggctaaattgcgttgatcttcttttaaggttgattctagttgcgttaatgttttttgacgtgcagctagcgcattatctagtttttgtttctcttgttgctgtttggtgagtacctgcttttgctcgttctgtttcgcttgttgggcgtctttttctgcctgtagctctttggaagtttgcgccaattgctccattgactgtttacgcgcttcatttatataactgtaataggctaagatccgctcttctcgctgaccttcttcaccgcgaaacagtaactcaataccttgatgttttccttgtcggtaagccgcatcgagttggcgtgctaacagtgcttgttgctcgttatattgcttttgcaatcgggcaatatttgcggtgatggttttgatctctttagctaaggtttgtaagcggttttgcgtctcatgcacagagcggctggcattagcgatttgtgtctcttgtgatttgagttgtccaagtaaagccgtgcgctgtttttgttgctcttgaacgcgcttttctttttcagcaatggtggtttgtagatcttttaactgactacgattatccgttaatgtattggcaaaagcgctggttgcagaaaacagagatgtgctaatcagtagcgtgattaacggtaaagaaaatacacggtaagtacggtgtgttgtgttctgaagatcctttttctctgccatctgaccaaagtacctttaataacagtttataagattatttcatgtcgctaatcaactgaccagttaacaggaaataaagtcgtaatttcagataatacctaacagttaatctaatgaactcagagatgataataaagcaataatagtcggaaagaggaaaaaagcagcacaatgtgtaacagcgcaatagaatagttatcacgctgtacacaggataaattattgttcgacgatggtaccccacagatcatattcatcggcatgctcaattagcacacgtacaatctgtcctggctcgacatcaaactgctcattaaggtaaacagcaccatcaatttccggtgcatccgccatactacggccaatagcaccttcttcatccacttcatcaatgataaccggtaaaactttacctattttctcttgcagacgctcggtggaaatttgttgctgtagttgcataaaacgatggtaacgctcttcttttacctcttcaggaacttgatcaggtaattcattcgctttcgcaccttcaacggggctatacttaaaacaacccacgcgatctaaacgagcttcggttaagaaatccaatagcatttggaaatcttcttctgtttctcccgggaaaccgacaataaaggttgaacgtaacgttaattcaggacaaatttctcgccaacgttttacacgctctaaagtacgctcaacagagcctgggcgcttcattaatttcagcactttcgggctagcgtgttgtagcggaatatctaaataaggcaaaattttgccttctgccattaatggaataacctcatccacatgtggataagggtaaacataatgtaaacgtacccaaatccctaattttgccagttgttcacataaactgaccatactggttttaacgggcataccatcccaaaaaccggtttgatgtttggtatcaactccataagcggaagtatcttgtgagataaccagtaactctttcaccccagcattgactaatcttttcgcttcatttaacacttcaccaattgggcgactgtctaaatcacctcgcattgaaggaataatgcaaaaagtacaacggtgattacaaccttcagaaatttttagataagcgtaatgacgaggggttaatttaacgccctgctcgggaaccaagctggtaaatgggttatgggaaggtttgggaacatagtgatgaatatgtgataacacttgttcataactatgagggccggtgatttccagcacttttgggtgaacttcacggatttgattttctttggcacctaaacaaccagtgacgataactttaccgttttcatcgagtgcttcgccaatggcttcaagagattcttgtactgcgctatcaataaagccacaggtattgacgatgactaaatcagcatcatcataggtaggaacaacttgataaccttctgtacgcagttcggtgaggatacgttcagagtccaccaaatttttaggacaacctaaagaaacgaatccaattttaggcacttgatttgtttgcgacatgctcgtgttctcaatacttttaataaataacaaatagtggttgtatctcagacaggtgtgaaattctacgtacgagtgactatttttgtcacaggctttgatgatgaatgctgatttcttaatagcttacctgaagagagatccggtaaagtgaaaagagagactcttttaaacgctgttttacaggatttttcggcgctaatggtacataaatccgtcaataaaaaaaatgattgttgagaaactttccgcaaaaactgaaagagaaacgaaggaataggctgtaattgcgccatgacaaaggtatactttggctctttaatactatttttaactaacgagagtgattgcatcctatgctgcaagaagtaatgcaattttttagccggcacaccctgttaagttttatctggattgcgctgctggtggcggtcattgtattgacctttaaaggccttttttctaaaacgaaaaatatttcccgtacagaagcgatttctttgataaacaaagagaatgcggtttgtgttgatatccgtagccgtgatgagttccgtaaaggacacatcatcgattctatcaatttaacgccttctgagatcaaaagtaacaatattgctgagctggagaaatataaatcacagccggtaattgtggtatcaccatcaggtattgagggtgcaaaacctgctgaaagccttatcaaattaggttttgaaaaagtctttattttaaaagatggtctttcaggttggagtggtgagaatttaccactggcaaaaggtaaaaagtaacgagcgggcagattgagttctatacttactgctattcaatttaataaggatataaaaaggtaagattattatgtcagaacagcaaaaccaagagatgacttttcaaattcaacgtatctacacaaaagatatctctttcgaagcgccaaatgccccacaagttttccaaaaagagtggcaaccagaagttaaattagatttagatacttcttctaatacgctagctgaaaatgtatatgaagttatcttacgtgtcactgttacggcaacaatggaagaagaaaccgctttcctgtgtgaagtacaacaagcaggtatctttactgttgaaggtatcgaaggtacacaattagcacattgcttaggtgcatactgcccgaacgtactattcccttatgcacgtgaatgtatcaccaacttagtgggtcgtggtactttcccacaattaaacttagcacctgttaactttgatgcgttgtttatgaactatttacagcaacaacagcaacaggatgcagcaaactcaggagttgaagaagcttaatgaacgcttctatgacagttatcggtgccggttcatacggcaccgctttagcgattaccttagcgcgtaatgggcacgatgttgtgctgtgggggcatgatcccaagcacgttgcggcattagaacaagcgcgctgtaatcaagcctttctgcccgatgtttcctttcctgatagtttatatatggaagcttctttgcaaaaagcgattgaagcgagccgtaatattcttgtggtgatcccaagccatgtgtttggtgaagtactgcaacaaatcaaaccctttttacgtcaggatgcacgtgttgtttgggcgacaaaaggtcttgaagcacatactggtcgcttattacaagatgttgcccgtgaagtattaggtaatgaaatcccgctcgcagtattatctggccctacttttgctaaagagcttgccgcgggtttgcccaccgcgattgcagtggcctcgacggataatctctttttagagcagttacaacagctatttcattgtggtaaaagtttccgagtctataaaaaccctgattttatcggtgtgcaactgggtggcgctgttaaaaacgtgattgctattggtgcgggtatgtctgatggtatgggatttggcgctaatgcgcgtaccgcactgattacccgaggtctagccgaaatgagccgtttaggtaaagccttaggtgcagatgcggcaacttttatgggcatggctggtttgggtgatttggttttaacctgtacagacaatcaatcacgtaatcgtcgctttggtatgatgctaggtcaaggtttagatgttgatacagcccaagagaaaattggccaggtagtcgaaggttatcgtaacaccaaagaagttcgcgcattagccgaacaagtgggtgtagaaatgccaatcaccgaacagatttaccaaattttatatcaacataaagatgtaaaagaggctgcattggctttattagggcgagcaaccaaagatgagatagacagtagcctgtagtcagtttattttaaataatattcttagggtatctgttttaactatccatttgtttgaaaattcaaagcctaagtatttacttaggctttcgtgtaaaaaatgagagtgagtatgtcgctagaagaactaacaagagtctgggatcatattaaaagcgaagcgcgtgcattggcagattgtgagccaatgttagccagtttctttcatgcgacacttctcaaacacgaaaatttaggtagtgcattaagctatatgctggccaataagctggcaactcagactatgccagccattgcagttcgcgaaattgttgaagaggcttatagtcacgatagctcaatgattgagtcggccgcttgtgatctctccgcggtacgcctacgtgatcccgcggtggataaatattctaccccactgctctatttaaaagggtttcatgcactacaagcctaccgtattgcccattggctatggcaacaaaatcgccaagcgctagctatttatctacaaaaccaaatatcagtcacctttggggtggatatccacccagcggcacgtattggacacggtattatgctcgaccatgcgacaggtattgtgattggtgaaacggcggtggttgaaaatgatgtctctattttacaatctgtgaccttagggggaacaggtaaaacaggaggtgatcgtcacccgaaagtgcgtgaaggggtaatgattggcgcaggagctaaaatccttggtaatatcgaaattggtcgtggtgctaaaattggtgctggctcggtagtattacatgaagtaccagctcatactacggtggccggggtgcctgcccgcattgtcggtcgtcctgatagtgaaaaaccgtcattcgatatggatcaacactttaatggtgttgtacccggctttgagtgtggtgatggtatttaactatgcatgctcaagctaaggttacccttgctgaactaaaagattgcttacaggctgaatatattggtgataaaaaaccctttagttggttaagactatttcatcgagtatttttctgccagcgttcccgttacctattttggtggcgggtagcacagtatttttatttctctccccatcgctttttacataaattaggtattcggatcggtgctagcaataatcgtaagtactgtaatgatatctcgttaaaaactcgtattggtaaaggcctttctttaccacacccgattggcattgtactgactaattactgccaactgggggaatatgtcactattatgcaaggggtgactattggcgtaaaagagaaagggggaaaagccaatatccaagtaggagatcatgtttatattggctgtaattcatccattattggtggtgagattaatattggtgataatgcgattattggcgcccatgcattagtattaaaggatgtgggggaagggtgtcggtatatcacgaaagtgattgccgatatcaggcgggtataatgcttgaacaaaggtttataaaaaaggtgctgaataaatattagcaccttttttagtttataaataaagataaaatcaagtaataagtatgaattaaaataactttaattaaccaaactaaccactaaatcaatctcttaataacgcacccggatagcctaattggcgccatgcctcaaaaacaaccacggcaaccgtattagaaagattcatactgcggctatccgctaacattggcacacggattttttgttgtgttggcatattatccaacacataaggtggtaaacctcgtgtctcagggccaaatagcagataatccccatcttgataacttacattactatgggcgggagtacctttagtggttaatgcaaacaaccgcgcacctgtcggggattgtgcattatcagggcttaatccttcactttctaaaaaagcataataatcgtgatgctgtttgatatcagcaaactcacgataatcaagccctgcacgacgtagccgtttatcatcccaagtaaaacccaatggttggatcaaatgaagatgaaagcctgtgttggcacacaggcggataatattacccgtattcggtggaatttcgggttcaaataagacgatattgagcattatttattttacttgataatagtttttataccaatcaacgaactgttttacaccttcatcaacgcttgtttgaggtttatagccagttgctttaaataaatcctcagtatctgcccatgtggtgtacacatcaccgggttgcattggtaacatatttttatctgcttttttacctaaatgtatttctaatgcactaatgtaatccattaaatttaccggagatccattaccaatattataaaccttatagggtgcagaactatctgctggagtacctgtacttactttccaatcttgctgggctgtagggatcacatcagcaatacgtgtaacaccttctacaatatcttcaacataagtgaaatcacgtttcatttcaccatggttatagatatctataggctgattgttaataatggctttagtaaatttaaataatgccatatcggggcgtccccaagggccatagactgtgaaaaaacgtaatccagtagtcggaataccatataaatgagaatagctatgcgccattaattcattagcttttttagtggctgcatataaagaaacaggatgattagcctgatcatgaggagaaaatggcaattcatcatttaagccatagactgaacttgatgatgcataaacaagatgcttaacgttattgtgtcggcacccttctaaaatagttagaaaaccagttaaattactatcagcgtaagaaaacggattaattagtgaatatctaacaccagcttgtgcagctaaatgaataaccctatcaaatttctcaatctcaaataattgagcaattttttctctatcagctaaatcaataaaagaaaaagagaaattatctagttgatttaaaagattaagtctagcttcttttaaagcaacatcataataatcattaaggttatcaataccaacaacggtttcaccctgctggatcagtttttttattagatgaaaaccaataaatccagcagcacctgtgactaaatatttcattacgtaattaatccgtttctattaattaatcgttaccaaagaggtctcgagtataaactttttcttcaacatcgtttagtgctgaagccattctattggtaataatgacatcagacatggctttaaactcatctaaattatgaattaattttgagttaaagaaagtctcttctttcatttctggctcataaatcactacttcaatgccttttgctttaatacgcttcataatgccttgaattgaagaggagcggaaattatcagagcctgatttcataattaaacggtaaacaccaacaatcttcggtgatttagcgataatagaatcagcaataaagtctttacgggtgcggttagcttccacaatggcgccaataatattattaggcacggattcgtaatttgctaacagttgtttcgtatcttttggtaagcagtagccaccataaccaaatgatggattgttatagtgattaccaatacgcggatctaaacagacaccttcaataatttgtcttgcatttaaattgtaagcttgggcgtagctatcgagttcattaaaataagcaacacgcagtgcgagataagtattagcaaataacttaatggcttctgcttctgtagaatcagtaaaaagaacatcaatatctttttttaatgccccttgttgtaaaagctcagcaaatttctctgctcttgcagattgctcaccaatcacaatacgagatggataaaggttatcgtaaagggcacgaccttcacgtaagaactcaggagagaagataatattatcggtatgatatttttctctcatctgtttagtaaaaccaactggaatggttgattttataatcatagtggtgtttggattatattctaaaacatcacgaataaccgactccacagaagaggtgttgaagtagttagttttaggatcataatcggtaggagtggcaatgataacaaattcagcatctttataagcgaattctttatctaaagttgctgtaaagtcgagttctttagtagctaaaaactcttcaatttctttatcagagataggagagatttttttgtttaatagttcgactttttctttattgatatctaatgcaacaactttgttgtgctgggaaaggagtatcccgttagatagaccgacatagccggttcctgagatggtgattttcattttttatcctaaagttacataatttcttttaacgcatctaaatatttttttatgactattctttcatcaaattcagtttcgattttttgcctactattttgacccatttttagttttttttcatagggcaagttaataaatctatccatggcatcaactaagcttgatacagacttaggttgacatatatatccattaaaaccatgagtaactgtttctcgacaaccaacattatcagtagtgattatgggttttcccatagctccagcttctagtaatgtttttggcactccttctcggtaaaaagaaggtagaactatacaatctgcttgggctaattcattttctacggtatcagatgtacctaaataattaataattccctctgctacccagttattcatttgtttatgtgtgattgctgaaggattatttacaccaacaaatcctaaaagacaaaattcaactttatcgccatatctttcttttaagatacgtgcagcttcaacataaaaagtaacccctttttcataaagcattcttgccactaatagaaatctaaatttatgtttatattctgacaatgacaatgtaaagcgagataaatcaacacctgaaccaggcaatctatcaacttgtactttatcgacatattttttttctaaaaataatgaaaggtcatcgttattttgaaaaaatattttatcagcatatttttggctatagcgatataaatttcttgctagtttacaactaatagtatcatttacaaataatgtacctaaacctgcaatattattgatgacttttattttgtttaatcttgctgctaatgttccataaatattatttttaggagtgaaattaagtacagcattacatctaagttgtttaaatattttataaaatgaaatcaatgtataaaggtcaatcaaaggatttttactggctgaatcaattttgatatttatatgttctgcacctaattcttttagtttgttagagtaactatcaataggtgaaacagtataaactttaaatccagcttctattaaagatattatagtattttttctaaagttatataaataccaactggtgtttgatgtaatggctataattttcatgttttagtcttttacttaaaattccagtatagaatcatattttttctaaagtatgatttatttctttataataatattctagtgaatatttattatattgactgtgagagtaaaaaccagcttcatttttatactgcttatttatagtcgttatcatcttcttaatttcactagtagtaatattatttaataaaatagagttttttgatttttctgctatttctttcattccaccatagttcattgtgataactttacatttagaaaaaataccttcaattaatgataggggagcgttttcatagcatagtgaaggtaataatatgtagtgagatttgtttaatatttcttgtatataatttttatctttaaacccatataatattatatcaatgtttttttcttttaatttttcttttaatctaataattttttcttttaattctccttcgccgaatatatttatactcagtaatttctgagaagaagtatcacaattacaaatgcattcaagaaaatcataaatacctttatcctttgtcaatctaccagcaaaggtaatcataatctgtgagtcacatttttttatattattgttgaatgcatttaaattattaattggattataaataagttttttattttcaaatggcaacaagttataaatgaaattactaggacatatataagtatctataacttttcttaaatcaaataaagagtaataaatataccattgaagaattctagctaagccatgaatataggaacgtctatccagtttagatgttaacaattttaaaaaagaaggtggagttacaaaaaaagctttttcttttcctttatagtaactcaaagaattgcttggtgatataatatgataatcatgaacagtcataattattttacaatatgtatttttcttcttgtgtagatatatagctaataaaattaaaggactaagtaagttgtcataattatgtatatgtacaacatctggggttgttttttctaaagttgtttttaattttttatatgcatttatattaaaaatataatttctaggattgaaattaaaataggtactaccaaagaaagtatatgatttccagcctctatcatcgaaacattttttagtatcattagtcacttgggcgctaccgcctttgagactattatcatttatgaataatatttttttcattgcttaactttttagggaatttttttaagaaatagatgattatgagaaatagtaatgttagtttaaatgatgtaaaaaaatatgttattccataccattgtatacgacattgcataatgtaaaaaacaataaatatgtattttatataattatttttatttttaaatgtaaatgtaaagaatagaaaatatattatattaaataaaataacaccatagctagagaatgcaatataaaatggagaataaaaaagtccaccaccgacattgtgtatataattatttaagaaccaagtaatgttttcttctgaactaactcctcctcctccagccaaaggtataaaagatttaattatgttaaataatggagtgaatgagtttccattatgctcaacataccaaatagaggaaagatatacatgaattacatcaactacagtacctacagataatagggattttgttataaataatgagatatcttgaatttgaatattagacctagcagcaccaataatactagctaagatagagaaagaaattaatataaggaaaagctttattatattaatttttctttctgttatattaccattactatcttttttcaataaaaataacaaaataatagtgattattgtatctgctctttcaccagaaaggaagcatattattaatatagtataagtaagaatatttattacatcatattttttggatttactgaataaaataaagatactcaatacattaaatacacctccccatgaaccgaatatcaaattatatcgtatcgtatcgcttattcccattgctttagggtatgcaataaaagaaattaataaaaacaaaaaaaataaaatacagcgaactggaatccctaaagaaatagtttttaggctaaaaatggtttttctataacttagtgaaataattaggataaaaatataactaatgactagagggatgattgaagtaatcatatcctgtttattatagtaatttaatcctatctgtttaattatcctacctacatcgtagttaaaacacataataaatataatgaaaataggataagcatatataactaggaataatttcattaaattacttttataaaaagtaataggtaaaaaaaataaaattaaagaagttaatattaacattttttaaaaaaacctataccacacttttctctaataatattatttttgttatcaagtgttttttctattaaagttaaggataaaaccctaaaccatgttgaaaaaatgtcgctatcatcaatatatattttataatctttaatcccactatagcaccatgttagtttttgcttaaatagaagggaataaattatatttttatttttcataaaaaaactattttttgcatcaatgttttttctttttaaaatcaagcgtagtggtattatatgaataatgtttttccagttaaagttacgtcttttagcccaacaaaaaccaccatcataattttgatttttagtgagtgagttataagactttaatagcgattttcttattttatttttttctgctccgctattaaataatctacataatatatctataccatctaaatcatcacatgaacctccaccagaggcatatgaatataacccgtcatattcttgaattaataaagtgctattaattatttcttccttatgctgaatattaattcccaaataatcaaaaaagaataaaaagtgaaaagctccagccatttggttatgcaaactagatttattattacaatcccaatatccagtgttattagattggttctttatgagccattctataatcgtttgtatataaatttcattttctagctcataattctcttgttcatatatgaaaaaatagagaataaacataatattgttagaaactaaccatggatttttccaattcaaattttctaaccaagattttaaatatgctttatctttgtattcttttagaaaaactaaattatgaggtagttctatatttaacatgtcacataccataattgcatggtaagtgatttggtggcttatatatttataatcatgttggtttttattatttttttcaatgatagaatcatagaataagccatcattattttgatgttttagaatgtatgatacactatcatctgttattaaatttttttgttgcaatacttctaatgcaagtaatgcaaaactcgttgataaacagcttgcacagctactttttttagaaaaagaatatgaaccattatcattttttaatgagtttataaaaattaaggcttgcttagaccagtttttttccatttaaatttatttccaaataaaatatactgagataatgtatttaaactaacaacaattaaagtactataaaaaatacctataaaaccatataaatataacaatgaaaaatctaatataacattaataatgccaaaaaataaggttgttgacgctactatttttgcaaaccctaaaggaatgattaaggcttgagtttgtaatatggcaaatatccttattggggcacaagctatgagtaagggaataatagatgaataagtagaataaggaatacctaataactgagtattatagttattttttaaaatataggatgataataaatataaagtaatacttaacataatacttatgcaaaaggaaatattagttaatttttttattttatcaatattagtattaataactctgggggctaaaacttgagctattaatccaaaaggtaaaatgcaatacatcaataaacgatcaaatatttcataggtagtaatttcagataaataattatatttacctaatattattatatctgcctttgtgtataaaaattggccaacaaacccaatgccgataattatagagtaagatgtaacttttaataaatattttttatcaaaagaaactttagaaaatattttttttctgcaattgtaaatatattgtagtaacaatgatgaataaaaaataagatttaaaagtagcaatcctgctatttttaaatagtacacaagaggaaatattaaaaatagacaaagtaaagctgataaaaaattatattttgcatttattttaaattctagttttcctcgatgaataccatcaaaaatagaacaaattggcattatagataatgttattcctaatagtattttaagattaaattctaaatttgataaaacaaaaaaaatgatcccagatagtgaagtcaatacaaagaaataaggaataattgatctatatatcttttcttcgtttcctttattttctgctatttctttcattagtgtggttgataagccaaaatctaaaaataagcttaatgtaactattattgttgtaatatatatatattcaccaaaattatcagctcctaggtgtgaggaaccataaaataaaataataagttgtaataagtgtttaataccaccctgactaaatttataaataatatcatatattaattttttcattaaattatagactcacattgcttcataattcttagtgcttgtttctttaaaccattattttcttctattatatagtgtgtgctatatctatatttttcaagcgatgtttttactgcctcaatttgttctttctttttatttgaggaaatagaattattgtgaattctaagtttatatagtggtgtttttagtaaagccatattgaattttgcatgtttaactgccagaataaaattaaaatcctgagcatactttatctcttcatcgtaatttattttttctataattttttttctaaaaaagaaagttccatgtatatgagggttaccatattttaaaattttcttcttaaacgcgatacttgaacgaattttaggtattaatctaagattattttgagcggaaaattgtattgcttgtgatgtacagaaatctattttattttttatacaaaactttagttgttcttctattctattttctaagctaatgtcatctgcatcttgtctagcaatccatgttccagttgctaaatgtattcctttattgagagattttgttaatccttcattttctttatcaatgaatattattcggggatctcttttttggaattcagtgcatatatgctttgtattgtctgtagaaccatcattaatgactattatttctaggtttttatgagtttgatttattattgattctaatgattcatgaatatatttttctgcattataagctgagattattatagatacttttgtactttctatattttgcatttttagtaaaaacctaatctattgtttattatattataatcaaagctaccgcactaggtttacggcccccagagcgccaaaatttctcttttaaaacccttatctatctgtaatataagagttttattttataagtatactttatctgtacacaaaccccactgagattagactcttcaaaccagcgggtcaagtaattgatgggtattctaacattgattaggtatatataagtatcggaatatcggccgatttggcaagatcattctgaattatgtataaaagataggtataagaagaatatgctaccaatttattaataaatggtagagtttgctaatatattaattttattttttatttaaattggttgttagtaggcgttctttgtaactatgatatcttgctgatttatatagtttaaatgttttctgtagaaggggtaagaactcagtgtaaacattgttattttatgttatgtcatagctattgatgctcgatgattataattatttcaactactttaaatgtttattgatattcactaattttatttattaatttatagtatatgcaatgtcgactataggaaataacatttaattaaaaatgaaaaatcatcccaaagttagtgtattaatgtcagtatataatgatgcagtacacttagaagaagcgataaattctattcttaatcaaacagttaaagatcttgaatttatcattattgatgatggttctactgatgtgtctgtagatatacttagacgatacgaaaagcaagatagtcgagttaaagtatatactaatgaatctaatattggattagctaagtctttgaataaaggttttttactctcttctggtgagtatattgctcgtatggatgctgatgactatgcatatcctatccgacttcaaaaacaattagagtttatggaggcgcataaaaatatcatggtttgtggtacatcaatggaaatttatgaagaccataataagtttatggttccaccaactgcacataatgccattgctgcgggattaatttttggaacaaatttttatcatccaacggtgatgtttagagcgagttttatcggagataatcaaatcacatatccagaagattacaaatatgctcaggattatgggttatgggttaaattattaaagttgggtaaaaaagatatttttgctaatttagaagaacctttattaaaatatcgaacccatccagaaaaaaatagaaaaaaatactttaatacacaaacttcatttgctataaaaacacaaattagcgcattagagatatttagtattaatgcaaatgagaaagttttatatgatttgaatttttcctctgaatatctcacattagataatataaaaaaatgtaattctttgttggaaaaaataagaattaaaaatatacaatcaaaaccttacttttataaggagcttaaggttgccatcatcagaaaaaaagtttctttatttaggcgttgtgagaagaaaagtttttattatccttatatgaagttgaaagctcgatttatttatttaattaatagaaaaataattaagtccataaactaaggggattccccttagtttaacttaagatagttgccaaaaatcatatcaacgtttttaacttcttcattatttagttctttatccattcctgctgatggtataaatgttaattctccaaaatggataataccattgtttaaatataaatctactctaacaaaaggaaatggcttagacagcttttctgcatattcaaatagtttttgataattttgaggtttctctagtacagttgaaacatttctatttttataatcaataccatagggtagtagctcccattctttattaacaaaatagaatttgggatggtgagattccctttctgtgcatatcattacaaatagtggtttaccatggaaacaaaataatttgtaatcgtatggcaattcattattttttgtttcaatgaatttttcacaaattatttttttaggtacatctttataaacaaattctacagataaacgccaataatcttcatttaaccaagttgataatttttgttttattttatcaggagatatactatttttatctctacaaataatattgtatcctgctccatggttgcattttagtacaaatttatttggtaattcggaaaaattaatttcatgtggttcttcccatacctgatggatttcattgagtatctcttgacagccacattctttaacatattctctagccgcatatttatctgcacattgtgttaccagcgggttatctctatataaatttagttttagccattgcaatttttcattgaaagtttgcggatgtctcaaatctaattttttattcattctttctttatatattgattttgttatcaattttggaaaaacatcacagtacttataacgtaatttatttctgataatttttaagtatttattcattttaacgattaattaaagtttagtatttttgtattttaaatctaaaggcggcttttagatagcttatgtttattttgttttcggcaaccaaatctccactcttaacccccctaatgggctatcgtcagctttaacatggcctcgatgttgactaattgcggtttcaacaattgccagtcctagtcctgtaccgccggattctctatcacgtgcttcgtccgtacgataaaaaggtcggaaaatatgctcgcgatcttctgggctaacccctgggccatcatcatcaacaataatagtgataccctgattttgttcggtaaaagccacttcaatacgagaatgtgaataacgcaaggcattgcgaacgatattttcaaaggcactcgctaatgaataaggattgcaataaatcgtccatgggcctggcggggcggttactgttagggttttattgctttgttctgcctcaaatttcgcattatctaaaatatcgttccaaagctcattcgcttttacggtttcacgtaataactcatttttatactgattgcgggaaagcactaataagtcattgatcatgccatctagccgctgtgtttctgtttcaatacgctctagctctttactttcaccgctacgacgacgtagtaatgcactggcaagctgtaaacgagttaacggggtgcgcaactcatgggagatatcagaaatcaatcgctgttgcgcttcaaccatacgctctaaggcgctgatcatctgattaaaactggtgcctgccgctaaaaattcttgcgggccggtttccagttcagggtgagggcgcagattaccttttgccacatcatccgccgcatttttgagttttcgggccggttttgccaagctccaagagagccaaaccagtagcggtgtactgataagcatggtgaatatcagtaataaaagcggtttatcaaataataaattgataaaatcagattgcgggctacttgatgggcgcactaagtaaagttggtagtgatcttcaccatctctaatggaaaaggggcctaacatctcagagcgaccgtattttttcttttttggatggtctgcattatcagactgtcccataaagtttctgacaacttgtatttcattacgttgagcaccaataatacgaccttcactggtgacaataataagacgttgaccaggtggcgcccatttatcaatggcgcggattaatcgccgccaccatagcagatcgttagccggatcttgcgctagttcggcttctatatgttgctctagcataacaccttgacggtattcactttcaagtaaagtggtaagctggcgcgagtccagcttgggtaccatcataactagcactagaactaatgctagtgtcagccagaatatggcgaatatacgcgctgacaaactgtttatcataaagattttttattaagttattgaaaccataagataaccacggccacgtaatgttttaaaccaaggctgcccgtctgttctttccggtaacttacgacgtaagttggaaatatgcatatcaatcgctctatcaaaaggtgttaagcgtttacctaacacttcttggctgagatgctcgcgcgataccacttgtcctaaatgctgagcaagtagataaagtaacgtaaactcagtacctgttagctctaatggttcattatcaaagctggcctcttgtctacccggattaagttgtaacttatcaacttgcaatatgggtgaggtgttgccatcggtctgtttctgttcactccagttggaacgacgtaaaatagccctaatgcgtgcaactagctctctatcgttaaatggcttaggtaaatagtcatctgctcccagctctaggccaagtacacgatcaagatcgctgcctcttgccgttaacataatgacaggtgtttggaaattttggcgtaactctttaagtgtctcgatcccgttcttacgtggcatcatgatatccagtaataacaagtcaatagacgcgtccagaagttttaaggcctgttcgccgtcagtggcgagcacaacattaaagccttccatttcaagtagttctttcaatagcgaggttaattcgcgatcgtcatccactaataagattttatgcattcgtcaattcctccaagagaaaaatacgataataaatagcgcgaatctatgactttacgttcttttacacgctctgacgctagtttgcagccgtaaaggtatagtaatccacatcgagaacaattacacatatttaggtcagcattaataagtcggtattataaccgaatgaggagtgggacaatgcgtaaagtagcaatggttgcactagcatcaatgtttttagtagctccgacggtagtaatggctgaaacatcaaatacaaataatcagcctgctgggcaacaacagtataatgataattaccattgtggatacggttacggtatgcatgatggacgtgataaccgaggtcatcgtggacaacgtggccatatgatgggtaacaataatttcggtgagtcgcgtatgtttaatggtattacattaacagagcaacaacgcactcaaatgcgcgatttaatgcgccagcatcatcaagatcgttttaataacagtgattttcgtcagcgtcacgaaaatatgcataagctaattaccgcggataagtttgatgaagcagcggtaagagcgcaaatacaagatatggacaaacaagcaatagagcgccgagttgaaatggcgaaagttcataatcaaatgtatcagctattaaccccagagcaaaaagcgcagctagaaaagaattatcaacagcgtgtctcttctgttagtcagcaaaaccagcaaactcaagagaaagctaattagtgattaagtaaagtcctttagtaatgtagtaagagtgtagtaaagcagtacctagttagagagtaagtagcaacaacgaagttttttccttgccatagacaccatccctgtcttttgcagcccctctggagaggggcttttttttgctcttttgtttaccattccttttaaaacaaagagttagatttcatttttaagggtaataaaagtctgctaaagtctttaaaggtggacgtttttggctgtccgtggacactttgtggacattttaaagacttataaatgctagatttcctctttactttttagtgggttaaattagtggcttctttcccgtttcttgcgactatacttcggtaaagtaataccacctactttttatttctgtctaacctctatgaaaaaagaaaggataaaaatgtaataacgtttttttgtcagttttgttctttgtttttaggtacaaattctaaatttttatttacggtaaaaacattgctgatgatttaacaataactcaacgtgaacagctgagagcaatgttagaaatgattaaaaaaaggggggatcatgactaaacgtgatattttttctgagcttcaagaaggaatgaatgcgtggagtgaatttaatgaagggaaaaaaacactaaagactcaccgtattaatgttaagcctctttctatgacgccagcagaagtaaaagcagtacgtgaaaaattgaatttatctcaagctgtttttgctcagtatttacatacgggggttacaacattacaaaactgggagcaagggatagtaaaaccgaataaacaagcggttttactacttaaaatggttgaaaaaagaccggatacgttgattgagctagcaggactttgatgtcggtatgtttaacgataactgaataattaacccctctggagaggggcttttttttgcgtttttaattttattattgatatattattttatcttctggtagtgaattataatcgattcattcttccttaattaatctaatcaactacaacaacgcctctggagattcaggtaaaatctgtccgccatcgacaataatggtttgaccggtaatatattttgcttcattagaggcaaagaatgcggcggcatagccgatatcttcaggctcccctaaggtatgggttgggatagaggccttcatttgattaagataggtctctccttgggcttgtaagccttcggttaaaatattgccgggcataacggcattaatggtaataccgtggcgtgcatattctagtgcagcactgcgcataaagcctaactgacctgctttgcttgctccgtaatggctccagcccggatagccagtaatggcgcctgtaatagaagaggtgatgatcacacggccatattgttgtttttccattaccgcaagggctgcttttactaagaaaaacattccttttaaattgacggtatgcattttatcccaatcagcttcgctcatctctttaattgtcgcttgggggaaaataccggtattagagcaaagaatatcgagtttgccatactgtttaacaatatcattgactacttgttcacaggctgcttgagaggtgacatcaaggtgcataaaatcaacaccaagtgcttctttggttgcgttacctgctacatcatcaatatcagcaataataacctgtgcaccgctgttttttaatgcgctaacaatgcctttaccaataccttttgctccgccggaaactaaagcaattttacccgttaaatcaaacataaaacctcctactgtactgtttgttatactgtatcagccttattgtataaacggtaaattaacgcaaaatttttgtcatcagtcacaattgtgtagggtgggcgcttcttctatttatgccgaatgacaaaaaagtatcgataacagcgcgcaaagtgttaagcaaaccgtcaataagcccattacactttatatcttgatagtaatatatggctaacacactgttttttgagatagatagcaaaaggctgtaaagtatctgtataaaaagtgttaacttatcggtgtaatacagagacgatagactagtatagtatttatacaggctactcaattaatttaatgcgcatcaagtttataaaaaaaaatgtacgttgatgatgaagtgataaaaaatatgcgtacaatggggttgttgaatcaattcagcatttgagatatcggtggattacgttcgtgaagccggtattaagataacagttattccaacaatatattgcaataatgatatcgaataagaatcagaggtaatcatggttaatgggatcaaaagaattggggttttaacaagtggtggtgatgcaccgggtatgaatgccgcgatccgtggtgttgtccgtgcagcactcagcgaaggtttagaagtgtacggtatttttgatggctatatgggcttatatgaaaaccgtatgaaaaaactcgatcgctttagtgtgtcagacatgatcaaccgtggtggtacttttttaggctctgcgcgtttcccagaattccgcgaagataatgtgcgtgccgttgctattgaaaatatgaagcaaaatgagctagatgcactggtggttatcgggggagatggttcttatctgggggcgaaaaaattaactgaagcgggtttcccatgtattggtttaccgggcaccattgataatgacgttgcgggtactgattacactattggctatttcacggcgttagaaacggcggtagaagcgattgaccgcttacgtgatacctcaacatcccataaacgtatctctatcgttgaagtgatgggacgttattgtggtgatttaaccttatccgctgctattgcgggtggttgtgagttcgtggtgttgcctgaatccgaattaccttttgatcgtgatgaattattagcagaaattaaagcgggtattgagcgtggtaaacgtcatgctatcgtggcaattactgaacatgtgtgtgatgtacatgagctggcacgttttattgaagcagaaaccaaacatgaaacacgtgccactgtattaggccatattcaacgtggcggctctccggttgcttacgatcgtattttagcctctcgtatgggtgcttactctgtacaactgctacttgaaggttatggtggtcgttgtgtagggatccaaaatgaaaaactggttcaccatgatattattgatgcggttatgaatatgaaacgtgtctttaaagccgattggtatgaaactgcgaaaaaactgtattaagccatagttttactctattaccagagcctttctgagttatatccttattcgtggactgttctgatgcaatatcagcttgtatcagaacagcttcccgagtgaaaacatttcattctacgcgcttttcttctcttatctgatgggtaatgactgtgtgagtcccccgttttctcaactatatagctgttacgtataacagtctgttttttattatttcatcgttataaatctttctgtcagcctagttaaacaaaacaaataaaccaactagaaataggataggggtagataacgatgttaaaacgatggggattattgacaacgctagcgctgacggcactgtttacacaaagcatctgggcgaaggatattcagttattaaatgtctcttacgatccgactcgagagctttatcaacaatataaccacgcatttagtcaatattggcaacaaaaaaccggcgatcatgtgactattcgtcaatctcatggtggctctggtaaacaggcaaccgccgtaattaatggtattgaagcggatattgtcaccctcgcattagcttatgatattgatgccattgcacaaagagggcgtatagataagcagtggatcacccgcttacctgataactcagcaccttacacctcaaccattgtttttttagtgagaaaaggtaatcccaaacagataaccgactgggattctttaattaaacccggtgtatcgattatcacacctaatcctaaaacctccggtggagcaagatggaattatctggctgcatggggatatggattaaaggccaatcagcaagacagtgaaaaagcgaaagcctttgtaaagtcactgtatcaacaggttgaagtattagactccggcgcaagaggcgcgacaaatacttttgttgagcgtggtattggtgatgtgttaattgcatgggaaaatgaagcgctactggcgattaatgagttaggtacagataagtttgaaatagtcaccccttccgtctctattttggcagagccaaccgtctctgtggtggataaagtggttgataagcgaggtacgcgggaagtggcaaccgcttatttagagtatctttattcacctcaagggcaagaaattgctgctaaaaactattatcgtccaagagataaaagcattgctgaaaaatatcaaaaacgttttccagccctgcaattattcactattgatgagctttttggcgattggcaatcagcacaacaaactcattttgccaccgggggaatatttgatgaaatcagccgacgtgattagcgagtaacgcataaaaaaatcaccttctgttaagacacagtaaggtgattttcgcgatagttatttatcggtaagataacgatttgctatcaaagttattttttcgcttttgcttctgctgccgctttcacgataacagcaaaggcatccgctttcagtgacgcgccaccaaccaatgctccgtcgatatcaggttggctaaatagctctgctgcgtttttatcgttgactgaaccgccgtattgaataatgacttgctcagcgatagccgcatcttgtttagcgatatgatcacgaataaatttatgtaccgcttgtgcttgtgcaggcgttgctgatttacctgtaccgatcgcccaaataggttcataagcgatcactgcatctttgaatgcttgtgcaccatgtgcatttaaaatcgcgtcgatttgacgtgcgcacacttcttgtgttttaccagcttcattttctgcttctgtttcaccgatacataacacaggtgttaagcctaactcttttaacacaccaaatttttgtgcgataaattcatcagattctttatggtaagtacgacgttcagagtgaccgatgatcacgtatttaacatcaacgtttttcagcatttctggggaagtttcgccagtgaaagcaccagataagttaacaccggtatcttgggcacctaacgcaatacggcttccaccgatttcatgacgagcttggcacagataaactgttggtggtgcaatagcaacatcacatccagcaacaccgctgatttctttacgtaatgcagcgattaattcatgaaccatatgaatgctgccgttaagtttccagttacccatgactaatggatggcgcataacttttcctccaaccgagtggtttaaatttaatttatcgataaactcaaattctgttgatgcacaacagtatagagaacattgaatagaatagctttgttttttatcacggaatagctgaatcgatattgctattgagtgaaagcttaatcggttcaatggcaaaggtcgttagttgattgtcctcgtgggcaataatatagcgaatagcaccgacattatggctaatataagcaggcacatcttgtttaacagcaaataaattgagcacctcttgaatttgcgttgcattaatggagggatcaaactgtgtcactaatgcagtgatatagcgcattgcagtatcttgatgctctttttcgatttgtggcgtatcaagtgaatggatcagggtgagctgtagactcttaattttttcactgccacgctctaatacggctgatgagtataaataaggggttattcgtgtcgcggccctgactaacggaatagtaatatcgttgttggtgataattttatattcattgagaaataacgtcgcattattttgattgaatttagctcttatctccggaatggtggtttcaaaaacaggggcatcctgtttaaggtaaagaatatcatctttagttgggggttgatgagcaatagagggcgacgctgccatagcaagggttggcaaagataaagcgatgcttattatgataagtgctaactgagtaagcgtgcttttttttatcatctgtcctccttggtctgttgtgcgatagaatattataaaatcactctgtattatttgatgttaaatggacagcttaattcactaaaataagtctatattgagaaattattaatgaccttacaacattgggccttttcattcaaagggcgaattggacgccgtgacttttgggcgggttttgcactctgttttgtgctgttttgcggattatatacagttaatcagcactattcattgcctgctgtgctggtggggataatttcgctggctattttatatccgttatgtgccatttttactaagcgacttcacgatagaaataaacgtggtgcatggctgttactattgttgctggcggtgatgctaggattgactgataccagtagtttagagcccttttggcaatgggcgataggtcgttttctcccttcatttattatgatgatcatgttgttagattgtggggtgtttattggcacccaaggagaaaactattttggtgccacgactgaaaaggttgactactcaagtttttgttaaagtgtgtaactgctaaacagtcagggctgaataaagtgctattcagccctgatgttatcattaccaatactgttcactggtgatatgtcccggtttacggcgtaaatgttttctcatatcacgctgtgttttcagtaactgttgcgtgtctcttaccatttctggattaccacatagcataatatggctctcttctggggaaatggttaatcctacggttttttctaatgcaccactttcaattaatgctggaatgcgcccggttagtgaacctatatgattttcacggctgacaatagtttggatacgcagtttcccttggtagcgttcagctaactgctccattaatggtagatagcttaaatcacgggcgtagcgtactgcatggactaaaacaatattttcgaaacggtcgagatcatcaccaagttgtaaaatagagagaaatggcccgatcgccgtacctgttgataacatccataaggtattcgcgctaggtacctcttctaaaacaaaaaaaccactggcttgttctgtcactaagagttcatcaccaacagttaacgctgctaagcgtgggctgagtttaccttcaggtacagtgactagatagaactctaagttgggatcttgcggggagttaacataagagtaggcgcgttgtatacgttcaccgtcaatttcgagtgccagtttggcaaattgacctgctgtaaacttatcgataggggcgtgtacaaccaaactgattaatgtatctgtccaatgcctaacttgaatgacttttccagtaacccaatttgccataatctcttatctcctttttaggaaagcgcttatgtcgataatttattctaaagaggaagggcgtttttatttatcaagatgatgtgatggcgatattaatctgtagtttcgttaatcgttaatacaaaatgtacatttatattgacaacgatggtgtttttcactgacatcgttgacgagataaaaatggctgactacttcgcaaattttgctagatttgttaccttagtctcattatttagcgcaagtgcattttgcagagtttattttatcaaagctctgtagcactttcctgtccgttaatcggttaatttttaatttctgagcaaagaaaagaaatgagaaagttagaacatgcaaatctgttattactgattattgcactggttgctgtcggtcaaatgacacagacgatttatgttcctgtgattgctgatatggctgtctattttggtgagccaacaggtgctgtacagcaagtaatgggcgcatatctgttttcttatggtttttcacaattaatttatggccctatttctgaccgagtagggcgtcgtccggttattttagtggggatgagtattttctgtttagcgacgatcgtggctattttttcacagaacttaactaccttagtgatcgccagtaccttacaaggaatggggactggggtcgcaggggtaatgacccgtactcagcctcgtgatctctataccggtactgcgttacgctatgccaatagcttattaaatatgggggtgttagtcagcccactcttagcgccaatgatcggtggggtggtggcgcacttctttggctggcatgcctgttatatcttcctattattattaggaggaagtgtactctttagtatgtatcactggatgccagaaacccgacctgtacaggctgaaagacgcagtatgttgtcatctttttatttattgctgtccaacagtacttttagtgcttttttgatcatgttgatttgtgcattatcaggtattgccgtatttgaagcttccagcggtgtgttgatgggaggcgtgttgggtttaaatagtattactatcagtattctatttattttacctattcccgcggccttctttggtgcgtggtacgcagggcgtgaaggtaaaacctttgtgcaattgatgtggcactccgtattttgctgtgtagcagcaggtattttaatgtggcttcccggctggctgaatattattaatatttggactttactggtgcccgctgccctgtttttctttggcgctgggatgctatttccgctggcaacgacaggggcgatggagccattcccttatttagccggagcggctggtgcgttggtgggcggattgcaaaatgttggctcagggatagcaacgtggttctctgcactattgccacagcataatcaatttagcttaggaatgattatgtttattatgtcagtggctattatgttgtgttggatcccgttatcacaccgttttagtcatcagcagaatacggtttaatgactacctttaagttttcgccaataaaaatgccgatagtgtatacctactatcggcatttgttttatgtcgcctaggcgacttctctctcatagggggtgattagcgattaaccgcgatcttcccattcttgtgcgcgggcaaccgcttttttccagccgttataacgataattacgctctgtggtttcaatacctgggcggaactctttatcaatctcggctttattttttacctcttccagatcagaccagaaacctaccgcaaggcctgcaaggaacgcagcccctaacgcagtactttcacgtaccacaggacgttcaacacgggtacctaagatgtcagattggaactgcattaagaagttattggcaacggcaccaccatctacacgtagtgcttgtaagcgtgctccagagtctgcttgcatcgcatcaaggacatcgcgggtttgataagcgatagattctaaagtcgctcgaataatatgattacggttagcaccacgggttaaaccgaagatagcgccacgggcatacggatcccaataaggtgcacctaagccagtaaatgcaggtacgacataaacaccgttggtgtcattaactttagtggcaaagtattctgagtcagttgcttcatcaattaattttagctcatcacgtagccactgaatggaagcaccaccgacgaagactgcaccttctaaggcatagtttacttcaccacgtgggccacagcagatagtggttaatagaccgtggttagagcgcacggcttctttacctgtattcatcagcaagaagcagcctgttccgtaggtgttttttgccataccgctttgtacacagagctgaccatagagtgccgcttgttggtcaccagccataccggcgataggaatacgtgtaccacctttaccaccaatgttggtttgaccataaacttcagaagaaggcaccactttaggtagcatattgcggggaatattcagcagatcgaggattttttgatcccaatctaaagagtgaatattaaacaacatagtacgtgaagcgttggtataatctgttacgtgaacacgaccttgtgtcattttccagactaaccaagtatcaacggtaccaaagagtaactctcctttttctgctcgttcacgagcgccttcaacattatcgaggatccattttaatttggtgcctgaaaaataggggtcaaccataagcccagtattttgacgaatgtactcttcaaccccttcttgatcttttaagcgagtacaaaagtctgcagtacggcgacattgccacacgatagcattatagataggtttaccggtctctttttcccagacgatagtcgtttcacgttggttggtaataccgataccggcaacatgatcagaagggatgtcttctttggccaatacttcaattagcgttgcgctttgagttgcccagatttccattggatcgtgctcaacccagccgggcttaggataaatttgggtaaattcgcgttgtgagatgctaacaatgttggagtcatgatcgattacgacagcgcgtgaactggttgttccctgatccagagcaacgatatattttttttcactattcgatttgtttgtttctgttgtcatgttagtaacctgttttcataatcaacgatattgcttgcatcgttatttgtcgttttcaattttgcaggtatcacaaggtaagtgacggccaataagtttacgataagcaagtgcgcctaaaatacccccaatcattggagcaatgagtgggactaagaaataaggaatatcgcgtccacctgttaaagcaatatcaccccatccggcaaagaatgcgactaattttggcccaaaatcacgggcagggtttaaggcgaatccagttaatggaccaaatgcaccaccgataaccgcaatcagaataccgataagtaatggcgctaaaggcccacgaggtacaccgttaccatcatctgttaaggctaaaattaagccaacgagaataacggcaataattacttcgataaaaaatgcgtggatcacagagatttgggctgctgggtaagtagagaagacgcccgcagtaaagaggctttcttgtgatcctcgtacaattccattgacctgttcgtagtcgataaataaattgtaatacataaagtacacaacagcggcggcaaaaaaaccacctaacatttgtgcaacaatataagggataacttttttacgttcaaagcacgcaaacaaccagaatgcgactgtgaccgccgggttgaggtgagcaccagaggtacccgcagtaaggtaaacggctaaggcaacacctaagccccagataatacttatctcccaaagaccgagttgagcgcctgcgatacgtgctgctgcaacacaaccaagaccaaagaagactagcaatgcagtaccgataaactcggaaatgcattgacccataagagaggttttcgtctggctcatatattctatcctgaaagagggtgattttaattgttagtattcttttcgtattgaaaagataactgtaaatttatcgttaatgagcgtaaacgagaataagcgaaattgaattttgtgtgtcccatcatgaaaatgagtgaaaacgctcttaaatagtgacttgtacaacactaggagtgtgatcagaccagtatttttgttaaattgaaaaaagcaggtaattccacggaagatgctagacagttgttgataggctacttacaatcgggagtatcgattatatgggggattacagtatgtcatttgaagtttttgaaaaattagagtcaaaagtacaacaagcactagataccatcacattattacagatggaaattgaagagctaaaagagaaaaatgatgcactgaatcaagaagtgcagggcgcaagagaatcaagagaagccttggttcgtgaaaacgaagagctgaaacaagagcaatcaagctggcaagagcgtttacgtgctctgctaggaaaaatggaagacgtacaataatcgtccaccgttttcaccagttaaaaacaaagccactgataaagtggcttttgtcgctttatgcgttatctttgttaataagagaatggtctattattcttctaataaatcatcatctaaatcgtcatcatctaagcctaaaggctcttcagataagataatgccagtattatcagcataaagataatcaccggagaagaaagtaacaccaccaaagtttacgcggatatcactgtcgccgatgccttcacttgggcaacctgcaggaatggcagccatcgcttgaatgcctaaatcaagctcagataaagcgtccacttggcgtactgcaccataaacaacaataccttcccattcgttgagtaccgccagttgcgccaattcagcgtcgactagcgctttgcggacagagcctccgccatcaactaatagaatacgatctttaccgttttcttctagtaagtcataaagcagaccattatcttcaaaacatttgacagtggtaatttgtccaccaaaagagctacgaccaccaaagtttgagaaaagcggttctacgacattgatatcttcttgatagatatcacagagttcagaagtatcatatttcataggatttacgtcaggttgcctcaggaaagtccagtatatcccttaacagggggtgttggcaaaagactcactgacaattcagtgagtcaaatcaacaatagcggtaaattactctaaaactaaacctaaagaaaaaagaatattggttaacagcgccgctttgaccatatgttcaagcagtggtcgcatggcttcgccactaagatcagcattaacgcgtttaatatgcagtaatagcatgggaacggctaataaaaatagccacgccgtccaacggtgcatataaatcagggtgaacacaatcaaacagataatggctatggcaatcacgcaggtgtggtaaatccgtgagccagaagcccccaaacgcaccgccaaggtatttttaccggcttgaatgtcgttttcaagatcacgcatattgttaatgttaagtactgcgaccgagagcagtccgcaggcggtggcaggcagtagtgtcacaatattaaaagcattagcttgcaaataataagtgccaatcacacttagccagccaaagaaaattaataccgaaatatcgcccaatcccatatagccataagggcgtttccctacggtataggtaatggcagccacgatagccaataagcccatcactaaaaagccaatagcatcttcgggttttttacaggcgacaattatcaaggcgatacctgaaatacaggagataattacattgataattaaggcttttttcatttgagcaggggtgataacccctttttgcattccacgcagtggccctaatcgctcttcagtatctgtccctttaacggcatcaccatagtcattcgctaagttagagagaatttgtagtgtgccagcagttaaaatcgccagtaatgcaataggtagctcaaaatgacccgtccaatacgctaaggcggagcctgtcacaatagcaattaaccctaaaggtagggttttgggtcgtaaactttcaagccaggcttgtgtccggctaatggaatgttgagcgctcatgctgaaattcaatactcatgttcgttgttattataaaaataagaatgggaggcaagcctcccacgttaatattgctgattaaggatcgcataagttgattataaaataaatcgactcagatcttcatctgctacaagctcatccagatgctgtttcacatattctgcatcaataagaatagtttcgccttgacgttcactcgcatcataggaaatttcttccattaaacgctctaataccgtatgtagacgacgtgcaccgatgttttcagtggtttcatttacacgccatgcagattcggcaattttgcgaataccgtcttggctaaagttaatgcttaccccttcggtagccattaatgcttgatactgttttgttaatgatgcatttggctcagtaaggatacgctcaaaatcttctgcagtcagtgcttgtagttcaacacgaataggcagacggccttgtaactcaggaattaagtcagaaggactagagacttggaatgcgcctgaggcaataaacagaatatgatctgttttcaccataccgtgcttagtggatacggtgcaaccttctaccagtggtaataggtcacgttgtacaccttcacgagaaacatcagggccagagctttgaccaccacgtttacagattttatctacttcatcaataaacacgataccatgttgctcaactgcatcgatggcttgttgttttaactcttcaggattaaccagtttagcggcttcttcttcgacaatcagtttaaacgcttctttgattttcatcttacgcgctttttgcttttgtcccgctaaattttggaacatggattgtaattgattagtcatctcttccatgcctggaggtgccataatttcaacacccattggggtggccgctaattcaatttcaatctctttgtcgtctaattggccttcacggagtttcttacggaacgcttggcgcgctgctgaaggctctgaggatgatgccgattctgtgactccccagttattttttgctggtgggatcagtacatcaagaatacgctcttctgccatttcttcagcacggtaacgatttttttcaatcgcttggctacgtaccattttaacagcagaatcagttaaatcgcggataatagaatcgacttctttacctacataacccacttcagtgaattttgtggcttcgactttgataaaaggtgcattggctaattttgctaaacgacgtgcaatttcagttttacctacccctgtaggtccaatcatcaaaatattttttggggttacttcatgacgcagcgcttcatcaagctgcatgcgacgccagcggttacgcagtgcaatagcaaccgcacgtttggccttatcttgaccaataataaatctgtcgagttcgctggcaatttcgcgaggagtcatttcggacatgctctcaaatccttactcttttgaagagatttcttcaaagttgacattatggttggtgtagatgcagatatcaccggcaatattcagtgctttttccgcaatttcgcgtgcacttagatcggtgttttctaacatcgctctcgccgctgcttgtgcataagggccaccagaaccaatagcaatcagatcgttttctggctgcacaacatcaccgttaccagtgataatcaaagatgttgtttcgtctgccacagccagtaatgcttctagtttgcgtaacattctgtctgtacgccaatctttcgcaagttcaacagcggctttagttaaatggccttgatggagctctaatttacgctcaaaaagttcaaaaagcgtgaaagcatcagcagtgccgccggcaaatcccgcaatcactttgtcgttataaagacggcgtactttgcgaacattgcctttcatgacggtattacccatcgtcgcctgtccatcaccaccgattacgacttggccattacggcgaacacttacgattgtagtcatgagtcagcccctggtttatcaataaaaagaagtgggttgtgctttaatatcagaaaaaacacagcccattatgtgaattagatttataggtgggggagaaattttatttttcaaccccccgcagtacgaagaatacaacctgatacacctgcgcctgcagcttgacggcttagcgtattggcttgctctttattaaatgggccagataaaacgcggatccagccgtcatttcctttggtcacacggctttcgataccggaaaatgctaaggttgcgcgtacagattcggcttgttcattggttttaaatgaaccgcattggactaaaaagcgcgcttcagtcgtcgctggttttggtgttgttatcgcaggtgcaggctcctgttttaccggtgctgaaggttgcgaaggttgtaccgaaggtgcggtggttgtcggtggggtaatgacaacctgtgaacgtggtacttcaccgttataaggcacttctggtaactctaccgccggttgacgtttatccgcttcaatttgttgtaaaaaacgtaattgctccggtgaaagtgtcgctttcggattaatctggctccctgaagaggtcgctggtggctgtaatgggttccccacctgtcgattctcaagctctttgatatattgccaacgctcttgcggtttaggtggtaagttgttagttggttgttgccctgcacttgatgacgttggttcgacaacctcttttttattatgggtaataaaatagaggccgccaacaaatagcgccacaagcgcaattgctacaataagtgtggttaaaggcaacccactggccgcctttttacctttgcctttcgttgtctttttacgacgagcagatgactgtcctcgtcccacatagtctcgttgtgccacagttcgattcgctgataattaaatgaataggtatcacaaccgatatgttacttaacatagtgtcttttgcctagcttttaagccgacagacactttctcttactattaactcacaatctaataggcgagagccgggtgcaacaggtctaccttgtaactgatcaagcagtaacaacatggattgacgaccaatttggtaacgtggctgttccatggtggttaatgcaggctcgctatagcgcgtaatatcaaggttatcgaagccaatcacagagagatcgtcaggtaattgtaagccaagttttttagcctgccacatcacaccaatcgccataatatcgctatgacagaataccgctgtcggtggttcaggtaacgaaattaactttttcagactttctgcaccgctttcgtgggtaaaatcacctctaataatataatcttcgcgtagagggacaccggttctacgcatagcttgaatataaccttgtaagcgataacgacatagtggcatatcttcagggccagtaatacaggcaatacgcttatgtcccatctgttgtagatagtgggtggctctaaaagaagcagtcaaattatcaatatgaacggttggcaattcaagctctggcgcaaattcatttgccatgatcataggaggaagatttttttgctcttctttagaaacatcaaaagggatatgagagccaagcagtaacatgccgtcaatctgcttagtaataattaaattaataaaggcattttcatgtttttgttggtgtttacagtcaccaattaacacaagatagccgtgttgagctgcggtttcttcaatgccacatacaacatctgtaaaaaagggatcactgatgttagggacgatcacgaggatcgtttttgactcgttacgtttcaggttttttgacaaattatgtgggtaataacccacgtcaagaacagcttgctcaactttttgacgggtttgtgaggatactttttctggattcattaatgtgcgtgacaccgtggctgttgacacgccagcagcaaaagcaacatctttcattgttgcttgtgcgctctctttattattctgttgcaaaccccatacctccgtactgatggtttggttaaacgattgcttttttgttgcaaaaaaaccgtcgttgtccaaaatacaaagatgcgacggttttttaattcaagaaatattctaaattgttattttacccactttttgaatagatactgttacctagtttgcataaaaagtgtgataccaatcgtttttatgaggtagttcgcaaaattgataaatagttttgaattataagcgcgctaaatatcagtaggcttagcaatcagttggatcaacatcaatattccatttcacttttttactctcaggaagcgccactatctgaggataagtaacagacattaacttttgtaaataaccccttgaaggatgttgcaataatagttgccaacggaaatttcctcctcgttttgcctgaatggccggaatggggcccatcacccataaatgactatctctcatcggatgttgctcgaagaactgtttaagctggcgtaaaaactggggggctttttggttattatgatcttcagagcggatcataatatggctggaataagggggtaaaaaggttgcttgtcgctcttgtaacgcctctttagtaaaagcatcatagcctttttctaacagcgttaataatagcgggtgatcgggttggtgagtttgtaaatagacggcaccttgtttcccagctcttcctgcacgacctgatacttgagtataaagctgagcaaaacgttcagcagcacgaaagtcactagaaaataaagcaccatcaacatcaagtagcgccaccagcgtaacgtctgggaagtggtgacctttagccaacatctgtgtgccaattagaatacgtgatccaccttgatagatgtcttctagttgttgctctaatgctcctttacgactggtggtatctttatcaatacgggtgatcggggtattaggaaataactcgccaatgccttgttcaagttgttctgtgcccaatcctactggcattaaattagttgaaccacattgagggcattgtgatggaatacgacgttggctatcacactggtggcaacgtagcatgccgtgtttttgatgtaaggtataatagtgatcacagcgagggcattcggcaatccaaccacactcatggcagagtaacgcaggcgcaaagccacggcgatttaaaaacaacatcacttggttaccggcattaagatgctcttttatggctttaatgagtgttggagagagtccggttgtgagcggttgcccttttaggtcgattaaatgctctgtggcaggtttagcatttcccgcccgttgcgttaacgtcagttgttgatattttttttgtgcaacgttatagctggtttcaatcgatggggtggcagtgcccatcacgataggaatattttcttgcttggcgcgaaagaccgctaaatcccgtgcatggtaacgccagccatcttgttgcttataagagccatcatgctcttcatcaataataataatccctaattgctgaaaaggggtgagcaatgccgagcgcgtaccgataataatggcattatctccccgtttcgctcgtagccataccgcaaggcgttccgtatcgttgagtccggagtgaagaacatcgacgggggcattaaaacgtgctttaaaacggcgaatggtttgtggggtcaaacctatttcagggactaagatcagtgcttgtttaccttgagcgagaatagtttcaagtacactgagatacacttctgttttaccagagcctgtgatccccaataataaccaaggcgaaaattggtctgcttgtgccgtgatagcaccaacagcaaccgcctgttcggcattaagtttaaatcgttcgccttgtacggcaaaagtgctttgccactgtataggggcgggttgaataggacgtaaatccgctaatgctttcttttttaagttatttagtgtcgctgttgtaatttcatattcatctaactggtggcgatacaaaggggcacggcgtagtgccgccaaagcttgttgttgctttttagcgctttttagactgttaagatcaagcgcttctccctcttgagtggcataccattgccataagggcgtaaattcagccggtttcccttgtcgtagtagaattggcatcgcatgaaagagaacttcacctaaaggataatgataataagcacttgcccaattaagcatatcccataagatccccggaaacagagtctctgtatcaagtacttcttcaataggtttcagtttttcaatgggaaactcactgtgtgaactaaaacctttaacaataccgatagagcgacgctgtttgccaaagggaacgaccacgcgacaacctattgttggcatggcacaaccttctggaagcaggtagtcaaaggaagaaaacagtggtacaggtaatattacctgaactatagtcatatcagggtttccgagtgttttagcgaaaagatagtattaagaatatcacaaaaagtgtgcagatttcattgcgcgtttggcggatattctgtatgatccgccccctttggtagataaaataccaaacaatttaattcaatcaacacgacgtgtggtgttcggctgagggctgaatagcgacacggccttagcagaggttttccatgaaaaaagatattcatcctaaatacgaagaaattactgcaacttgttcttgcggtaacgttatgaaaatcaactccacagcaggccacaacctgaatctggacgtttgtgataaatgccacccattctatactggtaaacaacgtgatgttgcaaccggtggtcgtgttgatctgttcaacaaacgtttcaaaatcccaggcagcaaataagatatttgttaccacaacttttcaggtaacactgaaaacgtgtagggaaaacggaattgaagaaagcccaaagtatttgctttgggctttttgttattctttatcgtctaaattatggtcactttgtatcatactttaaccgcttgatttttttattgatagtaagctttccctatctctattcatcacctagcgtgatctcccaatgataaaataacatatcgaatatacctcaaagcgatagcgctcttttgtatgcgttttttatgtaatatcgtcgccaatgttcgcgcttttaatagtgacaagacagatcacagctattcataatcctattcacttatctattcattaacctatttataagtagcgaatatcatgacacaacgagcagaagttatacgaaaaatactacgtaatggatctgagtcagcaaggtaactagctaatattatgaatattagtcagctaaccctgtctagagcattaaaaatgttgtctaatgatattgttcaaattggctcgggtcgttctattcacttatctattcattaacctatttataagtagcgaatatcatgacacaacgagcagaagttatacgaaaaatactacgtaatggatctgagtcagcaaggcaactagctaatattatgaatattagtcagctaaccctgtctagagtattaaaaatgttgtctaatgatattgttcgaattggttcgggtcgttctattcaatatgctttacgtgatggtttgcgtggcttcaactctgtaactatttatcgcataaatgaagaaggtaaaattaaattgttgggtaaatgacaccagcttatccagccggttttgttatgaagcgagttcgcgtatctctcgtctagagtaatgcacaaattgaagcccaaagtgttggctttgggcttctggttatatttttgctatcaaaaataatttctgatcaatattcccaagtctcgggatcaacaccccgctggcgcattatttcttttgcctcttcagggatttcatcgttacgctctttgcgtaagtcttcatcattggggagaggctgtccggtaaatgcgtgtaaaaatgcttcacacaataattcactattggtggcatgttttaggttattgacctgacgacgagtgcgctcatctgtcaaaatttttagcactttcaatgggattgaaactgtaatttttttgacttgttcgctttttttaccatgctcagcgtaagggctgatatattcaccgttccattcagccatggattaccttaattaatatcatttagttgaagccagtttagggttgatgccctattctgacgagccatgccagtttatcatgacttttctaaaaccaccgactgttactggctaaaggtgtgagaaaaagcaatagttacctggcgatatccttaatatttatattattccatttgttggtctatccgtaaaggagtttagatgtctagatgtattgacgtcttggtgtctaattggatatgctgtaagcgacttttccacttagcgctgtaacaaggtgtctgtatgacgaagaaaaccgcaaccattgccattcacaatgggcttaatgaagataagcaatatggctgtgttgtaccgccaatctatctttctagcacctataatttcttagcatttaatcaacctcgtgaacatgattactctcgtcggggcaatccctcgcgcgatatggtgcaaaatgcattagcagagcttgaaggtggggtgggagcggttgttactagcagtgggatgtcagcaattcatttaatttgtacgacttttttaaaaccgggtgatgtcattgtggcgccccatgattgttatgggggcagttatcgtctgtttaatagtcagcagcaacgtggtgcttatcgtgtggtatttgttgatcaaaacgatgagcaagcgttacaacaggcgttggcattagcaccaaaaatagtatttattgaaacacccagtaatccactattgcgcatcactgatattgagaaaataagccaattagctcaccaagttggggcgttggtggtggcggataacacctttatgagcccggtattgcaaaagccattggctttaggggctgatttagtggtgcattcttgcactaagtatcttaatgggcattctgatcttgtcgcgggtgttgtgattagtcagtgtaggaaacagcttgaggatttaagctggtgggcaaataatattggtgttactgctggggcgtttgatagttatttgttattacgagggatcagaaccttagtaccacgaattcgattacaacaagaaaatactcaagcattggtggcttatctacaaacacaacccttagtggataaaatttattacccagcactagaacatcatgtcggtcacgcgatagcgaaaaaacagcaacaaggttttggtgcgatgttaagttttgagttaaaaggggggattgaagcaattaaatcctttttatctcatttaacactctttacactggcagagtctttaggtggtgtagaaacattaatttgtcatccggcgaccatgacacacgcaggaatgtctgaagaagcgagaaaaaccgctgggatcagtaacgctttattgcgcatttccgtggggattgaggatagtctggatctcatcaacgatttacaaaatgcgtttaatgcagcaacgaaaaggtaaccatggatcatgagcgtagtggcgattaaacaacaggcgcaaccaacttgccgtcagttacataaattcggtggtagcagtcttgcagacataaaatgttatcagcgagttgtgaatatcatgacaaattatagccaacctaatgatttaatggtggtttctgcagcaggctcgacaacaaatcagctgattaactggttaaaattgagtcaaagtgatcgtatttctgcccatcaagctcagcaagaattacgtcgttatcagctatccttaattgaaggactattatcaaaagagcatgcacaagctctttcacaggcctttattgctgatttagaaagactaagttacttacttgataagccgataacggatgcaacttatgctgaagtcgttggtcatggtgaaatttggtcagcgagattaatggcaagcttattaacggagcagggtttacctagtgtgtggttagatgcgcgagagtttttatgtgcagagcgcgccgcacagcctcaagttaatgaagccttatcgcgtcctttgttacaatcattgctggctaaatatcctcaatgtcgctttgtggtaacgggttttattagtcgtaatcaacaaggtgagacggtgctattaggccgtaatggtagtgactactcagcgacccaagtaggtgctttagctgatgtgggtaaagtgaccatttggagcgatgttgcaggggtttatagtgccgatccccgaaaagtgaaagatgcctgtttgctaccgttattgcgtttagatgaggcgagcgagctggcaagattagcggcgcccgttttgcatacacgcacactacaacccgtctcagggagcaatatcgatttacaattacgttgcagttaccaaccagagcagggttcaactcgaattgaacgggtattagcatcaggcacaggggcaaaaattgtcactagccatgatgatgtttgtttaattgagcttcaattagccgcacatcaaaattttgaacaaatcgctaaagaagtggatgcattacttcagcgggtacaaattcgtccactggcaacaggtattgatagagatagtcagttgctacagttgtgttacaccagtgaagtcgctaatagtgcgttagatgttctgcaagatgcggccttaccgggtaaattacatctgcgagagggcttttctctcgttgctttagttggcgccggggtatgtaaaaatccactccattgccaccgtttctaccaacaacttaaagatcaaccggtagagtttatttggcacgcggaagataacatcagtttagttgcggtattacgtaactatacggcttcattattgcaaggtttacatcaaacattatttagggcagaaaaacagattggtttagtgctgtttggtaaagggaatattggctcacgttggttagagctgtttgctcgtgaacaagagccattatctgcacgtagtgattttgaatttattctggcgggggtggtagatagccgtcgcagcctactagatcaccaaggtattgatcctagtcgcgcactggccttttttgatgatgaagcaacagtgcatagtgaagagtcgcttcatttatggatgagatcgcatccttttgatgatttagtggtggtcgatattaccgctaatgaagagcttgccgcctgttatgaagattttgccagctatggttttcatgtgattagtgcaaataaaatcgctggctcggcatcaagtttacgctatcgcgcaactcgtgatgctttctctaaaacaggacgccactggttatataatgcgacagttggtgcgggattacctattaatcatacggtgcgtgatctacgtgaaagcggtgatacgattttatctatcagtggtattttctccggcacattgtcatggctatttttacaatttgatggcagcgtaccttttagtgatttggtagagcaagcatggcaacaagggctaaccgagcctgatccgcgtatcgatttatcaggacaagatgtgatgcgcaaattgattattttagcccgtgaagctggctatgatattgaacctgagcaagtccgtgttgaatcgctggttcctgctcaagcgcaaagtggatcattagaagccttctttgaaaatagcagtgtgattaatgaacaaatggcacaacgtttagcggctgccaatgagatggatatggtactgcgttatattgcgcggtttgacgctaacggcaaagcgaaggttggggttgaagcggtgagaaaagatcatcctctggcatcactattaccgggggataacctatttgctattgaaagccgttggtatcgtgataacccattagtcattagaggtcctggtgctggacgtgatgtgactgcgggggctattcagtctgatctcaatcgcctttctcaactattgtaaaagactattttctttttaatcaaaactatcagtgatttttttattgctgatagttttctgtgtatttttttctcttctatactgaaaaagatgatgattaattgtgtagatagagaggaaatatgaatagaattgttgaaaaatggatgtatcgctctcgttggttatttgcacctgtctatattggcttatctcttggattgttggcattaacgattaagttttttcagtcaatgtacgagatcttacccaatatatttgccttatctgaagctgatttagttttacgtttattatcgctaattgatttggcattagtgggggggttattgataatggttattttctcaggttatgagaattttattaccaatatggaaatcgaaggcgcgaaggataaactctcttggttaggtaacatggatgcagaatcgctgaaaaataaagttgctgcttctattgttgctatctcttctattcatttgttaggggtgtttatggacttaaaaaatatccccgataacaagttattatggtatgtggtgctacatctgacttttgttttttccgcttttgtgatgggctatttagagaagatctctaaacgaagtaagcgagcaaataaagccaatcaagggtgataaaatgagagctacagcacgtcgttatttttaaccttggctatacttagatcatctctagtcacaaaggagcgattaatgtcaaaaattgaaaaacatgttgatcagctaaaagataaagcgacggaggtgaagcatcggacagaagaaaaattatctgaagttgcccacgatttaaaacatggtgcatctgatcttaaagaaaacgtagaaaaaaagattgattcattgaaaaagtgaatgtgctatttgttaacacaaggcgctgcatagtcagcgccttttctatttaaggggtatcgatagggtgaaattggagaaaaaacaccagacaatttatcaatattaaaaaaattcatctaaatttttcgccagataaatttttacttatttcaccctttctagtaaaaaacgcttcttagacgataagaaacaaaaaaatgtccttattatggttaatattgagcaaaaacaacgtcgatattagccattcttataacactaaagccgtaattaaatttcagaaaattcccccaaaacgcttattttctgatatgaatagtaggctataagtaaaaagcagtgtggcttatcacaaaaatcacaataaagtcacataaaaaatgaaaattaattacacaactggaaggacatgactttttcttagtaaaaagtatgttgttaccgacacaaagccaaggtcaggagtcttatgaatcaacaatattctgctatgcgtagtaatgtcagcatgcttggcaaactactcggcgacacgataaaagaggcactcggtgaagaaattttagataaagtggaatctatccgaaagttatctaagtcatcacgagcaggtaatgaagttcagcgacaaaagctactattaaccttacaaaatctctctaatgatgagttattacctgttgctagagcattcaaccaattcttaaacctgactaatgtggcagagcaataccatagcatttctcctcatggcgaggcggcaagtaatcctgtggcattggctaaattaattgaacggctgaaagataaaaactttactaatcagcaactcaaacaagccgttgaacaaatttcgattgaattagtcttaacggctcatccaacggaaattgctcgccgcacgcttattcataagctagtggaagtcaatacttgcttatctcagcttgatcatgatgatcttgccgattatgaacgtaccaatattatgcgccgtttacgccaattggttgcgcaatcgtggcataccgatgagatcagaaaaattcgcccaacccctattgatgaagcgaaatggggttttgcggtggtcgaaaatagcttatgggaaggtgtgcctgctttcttacgtgaatttaatgaacagttagaagagtctattgactacaatttaccggtagaagcttctcctattcgctttacttcatggatggggggagatcgtgatggtaacccaaatgttaccgctgaaattacccgtcatgcattattacttagtcgctggaaagccgccgatctatttttaaatgatattcaggtgctcgtttctgagctgtctatgacagaaagcacaccagaattacgcgaattagcgggcggtgccgatgttgccgagccttatcgtgaaatagccaaacaattgcgcactcgtttacaagtgactcgtgattatttagaacaacgtatcaaaggtcagcaatcattacctcctgaaggcttactgattgataattcagcactttgggaacctttatatgcttgttaccaatcactgcatcagtgtggtatgcgcattattgccaatggacagttattagatactttgcgccgtatccgttgttttggattacaactggtgcgactcgatattcgccaagaaagcactaatcataccgaagcgctgtctgaattaacgcaatatttagagcttggtgattatgctagttggtctgaagagcaaaaacagacgtttttactgacagaacttaactctaaacgcccattgatccctactcattggcaaccgagtgaagcaactaaagaggtatttgaaacctgtcgggtaattgctgagtcaccaaaagattctattgcttcttatgtgatttccatggcgaaagtcccttcggatgtattagccgttaaactattactaaaagaagcaggggcagatattcgtttaccggtagcaccattatttgaaacgttagaagacttaaataacgcagaaagtgtgatgacccgtctgtttgatattccgtggtatcgcgatttaattgataacaaacagatggtaatgattggttattctgactcagcgaaagatgcgggtgtgatggcggcatcgtgggcacaatatcgagcacaggatgctttaattaagttatgtgagaaatctggcgtgacattaacgctatttcatggccgtggaggcactatcggccgtggaggtgcgccggcacatgctgcattattatcacaaccaccggggagtttaaaaggtgggttgcgggtgacagagcaaggagagatgatccgctttaaatttggcttaccgcaagtgactatcagtagtttggctcactatgctggtgcgattttagaagctaatttattgcctcctccagagccaaaaacagcttggattgaggttatggatgctttatctgatgtatcttgcgagatgtatcgtggctatgtcagaggtgaaaaagattttgtgccttatttccgagcagcgacgccagaaggtgaattaggtaaattaccattaggctctcgacctgctaaacgtcgtccaacaggaggcgttgaaacattgcgtgctattccgtggatcttcgcttggactcaaaaccgtttaatgttacccgcatggttaggggccggtgctgctttacagcatgagatagataacggaaaacaagccgtattggatgatatgtgtgagaattggcctttctttaatactcgtattgctatgctagagatggtgtatgcaaaagcggatctatggcttgcggagtattacgatcagcgtttagtcgaagaaaatttatggccattaggggcgaaattacgtcaacaactctctgatgatattaagagtgtattagcgatttccaaagatgagcatttaatggcggacttaccgtgggttgctgaatctatcgcattgcgtaatgtttatactgatccacttaacgtcctacaggcagagctattgcaacgctctcgtactcatagcgagtctgatccacgtattgaacaagcgttgatggtgactatcgcaggtattgcagcgggtatgcgtaataccggttagtggtcgcaatagggttattttattagtaaaacagcgctaaatttagcgctgtttttttatctttttttccaacggtgccaataaagaacgcaataaacacggcaaataaaccaacgttgatgccaattttgggcgcctttattaagggctggaaaaaggtgataagtactaaattgctgtgcaatgatggcttggttttttgtatcacagcgtttacgaaaaagaataaagaaactgccaagttcacgtagtgcttgttggcgcaacgcgttggctaatagtggttgatgttgtttatctgcaagctgcaagagttgtataacgatttgcaaataactttgtgcgcgcttggcttctttttgtggattaggtttacgcgtaatagagttaggattagcgcaatagtaataaagaggttgatcatcaaaggcgatacgttgagtgaccagtgcaagttgtgtcgtccacaaaatatcttcatgataaaggccatcaataaagcgtaggtgatgttttttgattatttcgtggcgaataaattgtaaccaaacaaaatgtggccattgatgttgcgtaacggcatggatcacccactcttggccgctgatcacttgttgataaggttgacgttggtggatggtagtttgatgcttttgtggattatgtacatcatagcgttcaccattgcctattaatacatcgatatgttgttcgcaggctaattgatgccaatgtgccagtaattgaggtttaataaaatcatcgctatcaaaaaagactatccaatcaccttgagcatattttaagccagtatttctcgcgctagataacccttggttagtttggtgataaaggtgaaaacgattatcttgttggcaatagagcatagcgatgtcaacactattatccgttgagccatcatttataatgatcacttcaaagtcgtgaaaggtttggcaaagtaggctctctaataatcgcgtaatgcgagatgcctcattaaacataggaacgataacagaaataatcggtgttttcacaatagcccgccaaggattgagagataatatcgcgctattttacctttttttggcctcttcataagacgcaattgcagttactcgtgctttggcgtgatcaacaattggttgtggataatcgaggtagtgacctgttttgattgcccattcagaaggagtatggatatagcgatctgggacatcagcaagctctggtagccagtggcggataaactcaccatcaggatcaaacttacgtccttgggttgtcggattaaaaatacgaaaataaggtacagcatcagtgcctgttgatgcagcccattgccagccaccattatttgacgcgaaatcaccatcaattaattgtgacataaaataattttccccccagcgccaatcaattaatagatctttgactaaaaaacttgccgtcagcatacgtaagcgattgtgcatccagccggtttgattcagttgtcgcatcgcggcatcaataataggaaagcctgttaagccctgtgtccaagcggtaaattcagtttggtcattacgccagcgaatattttctgtccatggttgaaaagctatctgtttggataaactcgggttagcaactattagatgttgataaaactcgcgccaaactaactcattaaaccaaacaaatgtactggaatggttattttctaagaaatcaggctctgtttggtaaaggcgattaaaacattggcgcacagacactaggcctatggcaagataaggggataattgactggttccatcaatagcaggaatatctcgccattttgcataatgtatcaccctttcatagcaaaactgttttaaacgctgtaacgctgcttgttcgcttgctgggaacatcttggttgatgatattggtagtgcaaaaagtggtgcacttaacggtgaaacggctttttggtgtgctcttatttcgggggcaggtaatgaagcattatcttgcgatagaaatagccgtaaaaatgcggttctaaaaggagtaaagactttgtacatctctccttgttgggtcacgacattccccggtggcacaaaaacgttatcgtggtaacaataaaccgtggtgttatgggcgagtaattccattacttttttatcacggttttgctcattaagcgcatattgatgattaaaaaatagcgcagtgacctgatgttgctgacaataatccacaatactttgtgccgcatcagcatatgtatcactgatgataagtgtcagtggaatatttaatttagctagcgcatgggaaagattaagcaatgcatcatgaataaacgcctgctgtgataaagccatatgatgggctttccactgtgcaggcgtgacggtaaaaatggcatgtacctgcgcctgtgtattttggcaagcataaaagagcgctttattatcggtcactcttagatcatgacggaaccaaactaaatgaacaggcgctgagtgcatgtaacctctcttaatctaattttggatgttgatcgataagcgcttggcgttttttctgtaatgcttcaatttccgcttcgatatcttcaacacgttgttcgatattgtcatagtgctcagataaaatctctttcgcttctgatttatctgatgctgccggtgttgctccacgtaatggtttgttggctgtttcaatcatttttatacccgttatcaaaccgacaacagcaactaccattagataataggcgggcatatataaattgccagtcgcttcaactaaccaagccgctgcagttggtgtggcaccagcaattaataccgaaatattaaatgcaatagctaaggcactataacgaatatgggttgggaaaatagccggtaaaatagaggccatcaccccagtaaaacagtttaataaaaccgcaagaattaataatcctaagaaaattaagccgatttcatcactgttaatcatcataaaggccggatatgccaatataaacagtccaacgctacccccgataacaaaaggtttacgaccaatcttatcactcagtaatccaatcacaggctgaacaaatagcatccctatcataatcgcgatgatgatcaagaccccatgatcggcggaataatttaagttatgggataaataacttggcatataggttagcaacatgtagtaggtgacgttggtcgcaatcactaagcccacacataccgttaaacttttccaatacttggaagcgatttctcgtaatgaaacacgtggcggattttcgatagatttacgatcatcgctgttcatttcatcaacatgttgttggaaggccggggtttcttctaaggcatgacgtaaatataagccaatcagacctaaaggtaatgccaagaagaatggaatacgccatccccactcatggaatgcagcttcacccataatggttgagataaggacaacaacacccgcccccataacgaagccggcaatagagccgaaatctaaccagcttcccataaagccccgtttacggtctggtgaatattcggcaacgaaaatcgccgcacctgagtactcaccaccaattgagaagccttgggctagttttgctaataacagtaagacgggtgcccaaatcccaatggtgtcatacccaggaataagaccgatagcaaaagtacttaatgccataattatgatggtgacagataagactttttgtcgtccaaacttatcccccaacataccaaatacaaccccacctaatggtctaacaaggaatgggactgagaatgtcgcaagtgctgcgatcatttgtacgccaggtgatgcaccagggaaaaacacttgacctaatacataagccaagaagccatatacaccaaaatcaaaccactccattgcattacctaacgctgccgcagtaatggcttttttaagtttgctatcatcaataatggttatatcattgattcttaatggtttatttctttttttcttcaatttcatattaagtgacctttcaattaaggtattagtaaattgttgttattcaattaataattaaacgaaatgaagtgactattttatagcgagaaaagagagtggtaataattcactaaaaaacagtttacttctacatagttaaatagtgagggtgaactaatagcttatggaacacttattaagtatagatgaggttaaatgaaagattagggattttttgtcgttgttttgatataacaaaacgaagcctctaagtaaaaaatgtgacctatatcatagctgaatatggcttttgtgtaaaatccatgatgttaatggttgtaaatttgaattaagttagatgaagatggcgataaaaagctaatagtaaatattattatataacaatgggttatgttggttttttattttttgattagaaataatatattgatagtcaaattatgcataataaatagttaatatctgctttaatgtggatgaaatcatctattattcgttgtgctaaaacacagaaataaaaacagtcattgctagatttggtgcagtcacttttctattctagcaaatagataaggtaagtcagtggataattaagtagatatcactattcttattaagagagcaaaaagagaggagatgtcataatatccactaggcataagagcagataatttgagtaatgcattgtagtataaatattaacaataattatttttataaaatcaataattaacggcatgcttgtgccaattaacccaggtactcctcatgaatattaatcaactgaaaagctttgttgaagtagtgcgaaatgactttaacattacgaatgcggcagagaaactctatacttcacaaccaacgattagtaagcaacttaagatattagaagacgaactcagtgtttctttattcgtccgtaaaaataataatttattagcacttagtcctatggggaaagaggtccataaaatagctagcgatattcttggacaggttgataaaattaaaagtattgtggcagaagaagatcgtaataaaaaagtagatttgcacattgccacaacacatacgcaaatacgttactccttacccaacgtcattgatcattttcgccgctattaccctaatatttcactccattttcaccaaggtgctcctgctcagttagcagaaatggtaaaaaatggcgatgtcgattttgccattgccacagaatcgatgcatttatatgaagatttaattactttgccttgctatcgctggactcgcagtttattagtaccttatgatcaccctcttgcatcattacctgatgatcaacaggttaccattgaacaacttggccaatatccccttattacctatgtgtttggtttcactcgaggctctaaactcgataaagtgttttataaaaaccatcttaaacctcaagtggcattgacggcgacagataccgaaattattaaatattatgtcaagcgccaccttggtattggtgtgattgccacggttgcttatgatgaaatagaagatagccaagcattaaagtgcatcaatatcgatcacttagtacagcccagttatacacatatatgcctaagtaaacatacgcatatgaaagattatatgcatgagtttatttcactctatgctccgcatattgatagaaatattattcagatgccagagcagtgggaaacccagtggcatagcaaagaagtgtatcaggggttacctgatctgatttcggtaaatagcaaagagaaaataatagaataaatcttcagttaagatgagggactaaaaagcccgtttttgcgggggcaaaaaacgggcttagggcagaataagtaattatttgcgagttagcagattaacaaaaatctgtgcacccactaataagcaatcatcatcaacaaaataaggattagcatgaaggtagttattgatacctttagcttgattaccactgcctaaaaagaacattgcgccaactttacctttagtggcattcaccatatagctaaagtcttcactacccgtcattggtttaccgttagattcgatattctcttctggtaaaaattggcgagtggcttctagtaaacgctgataagccgtaggatggttaataacagcagggtagcctgttgctgttaatgttgttttaaatccacccgctgtactgcgcgctacgatttcattaaagctttcttttaatactttgtcggtattttcatccatagagcggatagtaccacgggcttgaacgtgatctgctaacgcattaggaatagtaccgccattgatcatgccgcaaccaaataccgcagggctaaagggatcagtttttttggcaaccacataatccatataatcaattaagcgagttgcttcacgaatagcatctaaacctttatgcggtgtagatccgtgcgcagaaacaccataaacatctaatgtccatgctgagccgtaagatgacatgacaccatcattaaaacgtacacaaccggtttcgatagctgcatcattatgtagtgcgtaagtttcatcaacgccttccatgcaacctaactcaaccattttgtcagcaccaggaacacgcatatcctcttctgccatttggaaaataaaacgcacattagcgctcatttctgcttggttttcagcaaggtatttagcggccgttaatgcaatggtcatatgagtatcgtgaccacaattatgtgcacaaccttgatggatagagctgtgttcgttgttcgttaagtctggcatttctaatccatccatatctgcacggatggcaatcagtggaaaatcagcattaacaattaaatcggcagtaaatccagtatagccatcaaaggttttaatttgatagccaaagctttccatcaattcacggcaatactttgatgttttatattcttcacctgataactcaggaattttgtgcagatcttgtcgtgtttttttactaaagtcatttaattgaaagagtttttcgctgacattataaatattattcattagataactccctggatagtaaatccaatttgtgcgacgattgatgcgccgaagaaacagcaggtagaaacaatcatgaaaataaggatcactttccatgacattttcttcagttcttctaattggccaccaacggataaaccagcaaatgctaataaaggtacacaacaagataagaaagagactttaccgatagaactaataaaaaactctcttacaggtgtttcaggtaaacaaataagtatcccgataatagttgcataagcaaatgttggtagagatgaaggtaaatattgtttagcaacgagtgaaataaaaaccactacagacatagcaataaagctatcccacattgcataaatagcaatccctgatgttaacgtttgagtaaacattgccagtaaaatagcaacgaatactaatttcatatctataattatatttttcatgcagttttgcctctggtgaaaactttataaattttttctgaaagaggtaaacctaaataggttaatgagagtgcgccaagtgcagaagataataagttagatgcagccgcaacacttaatacttgttgtgctaaagcttcgtctaaaccgttaattaatgcccctgatgcagcacttaacattgaacctgaacctacgccggagcctgctgctagagcaagtgggtgtaagcctgttaatggtgcaagactacctaatacgctaaaccataaagtcccgataacagaaccacataagtaaatagctaatacaccaatatattcttgtgagccagtcccaaatctaccttgaataacggcgatagaaggttctcgactaatagatgaacatgcaccaattgcacggcgaccaaaaccaaatttaatggctaatggtacggcaattaatactggtaataagtttcctagctcttgaacaaataaaggaataccgacacttaaaatcatttttatatttgggacgatcatgccagcatattgcgtacctaaaataagtaggctgaaacctaccattttaccgcagaagccttcttctttttctgtaaataatttaccccaaactttaatttttttgcgggtaaatccagccgacataaacataccaataataactgcaaataacattggtagaataggaatgactgcaatgccaatcttaatttcttttttaccaatcacatattgtgaaataaaaattaagaaaaggactgccagaatactaataaagaaaacctttatcggacttctacttttgtccatccgttaatctccgtagaaaaataaacaggctttattctagaggacaaaaagcaaaaggtagcgtgaccaatgtcatgtttacttcatacctctttttcatgggacatgaaataaaataatagtaataaatttattaacaatttgagttaactgaaattattgaggaaagacagagagtaaggctgaaatgtgtcagctatattgttaaataaaatgatagtagaaaaagagcaattaaaaattagtttaattattaaaataatcctataagtttattttgtctagcacttgatgattttaatacaatataaatgagatagattcttatttaatgcgaaatgagtcataaaagcgataagtgcgtttatcaatagtattattttttatagttaatttcctttattaattgacctatctaccgtgacaatcaatcaagagatgttattcttaatatttgatttaataacacggtattctctatatgatgtggtaaaagagtcggttgttatatctggggcagcatgtagagagattacccactaaaataaaaaggaaatgcgtcacatgagtaagcaaacagttgcaacctatattgctaaagtgctccataatgcaggtgtgaaacgtatttggggggtgacgggcgattcattgaatggattaagtgatagcttgcgcaaaatgggtaccattgaatggatgggcacacgccatgaagaagtcgcggcttttgccgccggagcagaagcggctatcaatggtgaattagccgtttgtgccggctcctgtggaccaggtaacttacacttaattaatggactttttgattgtcatcgtaatcatgttcccgtgttagcgattgccgctcatattccctctgctgaaattggtagtaattactttcaagaaactcatcctcaagagttgtttcgtgaatgtagtcactattgtgaattagtctctaatcccgatcagatcccacaaattctggctatcgctatgcgcaccgctattttgaaaaagggtgttgcggtggtggtattacccggtgatgtagcgttaaaacccgctccagaagatgcccatgaaaattggtatccactacaatcaccactgattatgccgaatcgttttgaaatcgaaaaactttctgaggcactgaataacgctaaaaatatcaccttaatgtgtggtgccggttgtgctcaagcacatgatgaagtggtgaaactagcacaaaccttaaaagcccctgttgtgcatgcactacgtggtaaagagtatcttgagtggaataatccatgtagcgtgggaatgacgggtcttatcggtttttcatcgggttatcacgcaatggagaatgccgatactttagtactgttaggtactcaattcccttatcgcgctttctatcctgccaaagctaatattattcaaattgaccttaatccaagtagcattggctcacattgccatgtggatatggcttttgttggagatgtcaaagcaacccttaatgcattacaaccgcgattaaaagagaaaacagataccgcacatcttgatgcctcgttaaaacattatgctaaagcacgcaaagatttagatgcattggctcaacctagtgagcgtgagttgatccaccctcagtatttagcacgtcgattaagtgaattagccaacgatgatgcggtatttacctgtgatgttggcacgccaacagtttgggcagcacgttacgtgaaaatgaatggtaaacgtcgtttaattggttcatttaaccatggctcaatggcgaatgcgatggcgcaagctattggtattcaagcactggacagaaaacgtcaagttgtggcgatgtgcggtgacggtggttttaccatgttaatgggtgatttcatctcattggctcaaatgaacttaccggtgaaagtggtgatttttaataacagcgtattaggttttgtggcgatggaaatgaaagcggggggctatttgactgatggcaccgatttacataatcctgattttgccgctattgccaatgcggcgggaattaaaggtattcgcgttgagaaaggcgaagatcttgatgaagcattaaaaacagcctttgaacatgatggccctgttattgtggatgtggtaaccgcaaaacaagagctttccatgcctccggaaattaaatttgagcaggccaaaggttttagcttgtatatgatgaaagcgattattaatggtcgtggcgatgaaatagtgcaattagcgaaaaccaactggttgcgctaatcattaaacgcataatcgttatattgcgagttgcaggggctaatagcctacctgcaacttgcatttcaacataagtcgataggattttttattatttcgctttctctgctaaacaaaagttttcaattaattgccccattaattcacgagttggctcaataaaagccatatcaataaactcatcaggctggtgggcttgttcaatggagccaggaccaagcactagcgtagggcatagcgcttgaataaaaggtgcttcggtacagtaattaacagtttgcgctttctcacccagtagtttttcaatcacggcaaccattttatgatcggtcggacactcgtagccgggaataggctcgtgcaatgcttcgacacttaaacgtcccggccagcgcgcttttaccggggctaatgtttcgtgcagcagatcatcaagatcttgcagcgttaatcccggtaatgggcgaatatccatatgtaattcacagcaagcacaaattctattagcagcatcaccaccgttaatataaccaaagttcatggtgggatagggaataacaaacgccggattgttataacgggtttttaatctatcgcgcagtgtactgagatgggtgatagattcatgcattaactcaatagcgttgacacctttttccggatcactagagtgaccggattgcccagtaatacggatagcattagataaatgccctttgtgagcacgtattggttgtaatgaggtgggttcgccaataatagcaaaatcaggacgaatagcggtattagcggcaaaataacgtgcaccagccatcgacgtttcttcatctgctgtagcaagaatatacagaggatgtgtgagttgagaggtatctatatctcgcaatgcatcaataataaaggcaaaaaagcctttcatatctgccgtacctaaaccatataacttgccttctttttccgttagggtaaagggatcttgagtccaacgcccttcatcaaatggcaccgtatccgtatgtccacagagtaataacccgccggttccactgccaagggtagcaagtaggttaaatttccctctggtttcaggtactggttgtatttcaattgaaaaaccgagtgtttccaaccaattagccaacagattaatcagtgcctcgttactttggtctgtcttagcatctgttgcactaattgagggtgttgcaattaattgtcgataaagctcaataaatgtaggtaatttaatattcactgttgacagcctttcttcataatagtatcaatattcatgcactttttttgaataaaaatacattaatcggtttgtgttcatagtacaaggtaagaatgacatgttaaatactctgattgtaggagcaagtggttacaccggtgctgaattagcagcctatcttcagcagcatccccatgtaaatttgagcagactgatggtatccgctcaaagtgtagatgcagggaagtgcttttctgagctttacccacaatatcgtggcttagttgatttgccacttgagcctatggtcgatgttgctaatgccgctgaaaatatcgatatcgtttttttagccaccgcacatgaagttagtcatgacattgcccctatttttctcgctcaggggtgtgtggtgttcgatttatccggcgcctaccgagtacaaaataaacatttctaccaacaatactatggattcgagcataagaatactgattggttatcacaggcggtttatggtcttgccgaatggaacgctgatcagattagtcaggctcaacttattgctgtgccgggttgttatcccaccgtttctcagctgtcgttaaagccattagttgaagcgggattattagacagcactcactggcctgttatcaatgccaccagcggtgtaagtggcgcaggcagaaaagcgtctttaacaaacagcttttgtgaagtgagtttacaaccttacggtgtttttacgcatcgtcaccaaccggaaattgctactcaccttggcattgatgtcatttttactcctcatcttggtaattttgctagggggatcttagccactatcacctgtaagttaaaacaaggtgtcacagaaaatgaggtaaggcaggcatttgaaacagcgtatcaaggccaaccgttggtacgtgtgtatgacaaaggtctacctgcattaaaagccgttgtcggtaccgccttttgtgatatcgggttagcacaacaaggtgagcatttaattattgtcggtgcggaagataacttattaaaaggggccgcagcacaagcggtgcaatgtatgaacattcggttcggttttgcaccaaccgaaacacttatctaaataatgagtagggacgttttatggaaccattaattatcaaactaggcggtgtactgctagataacgaaaaagcgttaacacgtttttttacagcactacaagaatatcgtactagtcatagtcgtccattagtgattgttcatggtggtggctgtttggttgattctctgatgaaaaagctgcaattgcccgttgttaaaaaacaaggcctacgagttacccccgccgatcaaattgacattattactggcgcgttggcaggaagtgccaataaaacattgctgtcatgggccacacgctttggtttaaatggtgtcggactttgtttgggcgatggccaattagctaaagtaacaaaaattagtgatgaactaggtcatgtaggaaatgctgaacctggctctcctgagttattaaatctattactgaatgcagggtatctcccgattattagttctataggtgtgagtatccaaggtgaactgatgaatgttaatgctgaccaagcggcaacagcgattgctgaaaccttaggagcagatttggtgttgctctcagatgtaagcggcattttggatggcaaaggacaaaaactcacagaaatatctgccacaaaagcgcaagcattaatcgaccaaggcattatcaccgacggcatgattgttaaagttaatgctgcgttagaagcggcaagaacgcttagacgtcctgttgaaatagccagttggcgtcacgcggaaaaactgactgatttatttaatggtatggtgatcgggacacgtattttagcttaaacacaaccacataacgctttgtatattggcgaaataaacacaattgagaataaaggttatcactatgacgaaaggtattaaaaaaattgtactggcatattcaggtggtctagacacatcggctatcatcccttggttaaaagagcattatgacaattgcgaggtggttgcgtttgttgctgatgtgggacaaagccgtgaagatctggaaggtgtagagcaaaaagcattggcgtcaggggccagtgaatgctatgtggttgatttacgagaagagtttattaaagactatgtgtatccagtattaaaaacaggagcattatatgaagggagctatttgttaggcacttcaatggcacgtcctgtgattgctaaagcacaagttgaattggcattaaaactcggggctgatgccttggcgcatggcgcaacaggtaaaggtaatgaccaagttcgttttgaaagtacttataccgcactggcaccgcaacttaaagtggttgcgccttggagagagtgggacttgcgctcccgtgaagctctactggattatctaaaagttcgtcatattccaaccacggcgacacttgagaaaatttatagtcgtgatgaaaacgcatggcatatctcaacagaaggtggagtgttagaaagtccatggaatgcttctaatgaagattgctgggcatggacggtagatccgaaaaaagcccctgatacacctgaacaggtttctgtaacggtaaaagcaggtgaagtggttgctatcaatggcaaagctcaatccccttatgagtgtttagctacattaaatacgctaggcgtaaaacacggtattggtcgtattgatattgtggaaaatcgtctggtcggtatgaaatctcgcggttgctatgaaaccccgggaggcaccattatgatggcggcactgcgtggtgttgagcaactggttttggatagagatgcttttaaatggcgtcaacagttgggtttagagatgtcttatgttgtttatgacggtcgttggtttacgccaattcgggcttcattacaagctgctgctgactcgctggcaacagaggtaaatggcgaagtggtgttagagctttataaaggccatgtgaatgctattcagaaaaaatctgacaacagcctctactcggaagagttcgccacctttggtgaagatgaagtctatgatcacagccatgcagaagggtttatccgcctatactctttgccatcacgtattcgggcattaagtaaaaagaaataaggtgagaccaataagagtgatgtgacaaaaggcatcactctatacatttttatcaagcatgacttttaacaaagacaaaataggatgtgattatggcactttggggtggacgttttagtcagcaagctgatcaacggtttaaacaattcaatgattcactgcggtttgactatcgactcgcacaacaagatatctttggttcagtagcttggtctaaagcgttagtcacagtaggtgtcttatcgcaggatgaacaagctcaacttgaacaggcactttatgagctgtctgaggaagtaacagctaatccccattctattttacaaagtgatgcggaagatattcatagttgggtagagagcaaactgattgccaaagtgggtgatttaggtaagaagttgcacactggacgtagccgtaatgatcaggtcgcgacagatttaaaattgtggtgtaaagaagaagtcgcccacttacgtcaggctattattgaattacaaaaggcgttagtggtaaccgctgagcaaaatcaacatgctgtgatgcccggttatactcatttacaacgtgctcaacccgtcacttttgcgcattggtgtttagcttataaagagatgttagcaagagatgagagccgtttagcggatgcattaacgcgtttagatgtaagtccactgggtagtggcgctttggcgggtaccgcttatgatattgatcgtgaacaattagctcaatggttgggttttgccagtgcaacaaacaatagtttagatagcgtatcagatagagatcatgtgttagagctattatctgcggccgctattggtatggtgcatctttctcgttttgctgaagatttgattttctttaatagtggggaagcaggttttattgagctttcagataaagtcacttctggctcttcattaatgccacagaagaaaaatcctgatgcattagaacttattcgtggtaagtgcgggcgtgtgcaaggggcattaaccgcaatgatgatgaccctaaaagggttgcctcttgcttataataaagatatgcaagaagacaaagaagggctgtttgatgccgttgatacttggtctgattgtttgcatatggcaacattagtgcttgatgggttgcaggttcgccgtcctcgttgtgaagaggccgcaaaacaaggttatgccaatgcgacagagcttgctgattatttagtcgcaaaaggggtgccatttcgccaagctcaccatattgtcggtgaagttgttgttagtgcaattgagcaaggtaaagcgcttgaagagttggcgctatctgaattacagaagtttagtagcaaaattaccgttgaagtttacgagatcctttcattgcaatcttgtttagataaacgattagcaaaaggtggggtatctcaacagcaggtttcttatgccattactgaggccaaaaaacagcttaatatggatgagtagttttatcccattgtataactgacagattattcaaaaaaagcagggtggctcatgaactgccctgcttttttatggacgcttaccgataataatagtttaatcaattgatatatcaccatttattgataaaagatgaaaaaatcacgttacaataacgcacgattgatagaaaaatttatcagttgttatattatctatagctattaactatcagtaataagtatgggatctgcaatgaatatccgtgatttggaatatctggtggctctagctgagcataaacattttcgccgtgcggcagattcttgccatgtgagccagccaacattaagtggccaaattcgtaaacttgaggacgaattaggcgttatgttacttgaaagaaccagtcgcaaagtactgtttacccagcagggattattgctagtagagcaagcgaaaacggtattacgtgaagtgaaagtgctacaagaaatggcatcactacaaggtgagagtatggcagggccgttacatattgggcttattcctactgttggaccttatttattaccgcatattattcccgaattacatagaaactaccctaagttagagatgtatcttcacgaagcacaaaccaatagcttattagctcagttagatagcggtaaactcgactgtgctattttagccatggtaaaagagagtgccccttttatagaagtgcctttgtttgaagagccgatgaaattagctatttatgatgagcatccatggcatgatcgcaaatcagtgccgatgggggacttagcaggccaacgtttattaatgttagaagatgggcattgcttacgtgatcaagctttaggtttttgtttccaagcaggggctaaagaagatacccattttagagcaactagtttagaaacattgcgtaatatggtcgctgcaggaagtggtattacacttttacctgatttagcggtacctcaagcacaaaaacgcgatggcgtttgctatttagattgtacttcacctaatccatcacgttctattattttggcttatcgccccggatcgcctttgcgtaatcgttatgaacaattagcagagacaatccgtgatcatatgaccgcattttatgaggctaagaaagcaacatcaaaataagcgatttaaaccatttaaagcagcaacgcgataggcttccgccatggttggatagttgaaggtggtattaacgaagtattcgatagtattgccttctcctttctgctccataattgcttgtccgatatgaattatttcagcagcgcgctcgccaaagcagtgaatacctaaaatttgcttggtttcacggtgaaaaagaatttttaagctaccgacattcatacccgcaatttgggctctagcaagatgcttaaattgtgaacgaccgacctcataggggatcttcattgcggtgagttgctgttccgttttacccacagagctgatttctggaatggtatagatacccgttggaatatcttcaattaaatgcgtttccgaggtgcctgtggtaagcgcaagtgccgcaatgcgcccttgatcataagccgcagaggctaagcttggatagccaatcacatcacctactgcatagatatgttcacaactggtttgataatgcgcattaactgccacttgtccacggctatcggttttgatcccaacattttctaaaccaagcgtatcggtattacccgttctaccattagcataaagcagacaatcggctttgactttcttaccggattttagatgaacaataacgccatcatcaacgccttcgatggtgtcgtactcttcattgtgtcgaataacaataccgttattccaaaaatggtaagagagtgcatctgacatttcttgatcaaggaatgacagtagatgatcacgagtattaattaaatcaacttttactcttagacctctaaaaatagaagcgtattcacaaccaatgaccccagcaccataaataatgacatggcgaggttcatgctcaaggtcgagtatggtatcgctgttataaatacgagagtgtgagaaatcaacatccggtgggcaataagggcgagagcctgtggcaataataaaattatctgcactgagaatatcacaagtaccatcaggataacgtacgctaattctatgatcatcaataaaagcagcttcgcctgaatacatcgtacaatgattacgctcgtagaagccttgacgcattttagtctgttgactgattaccgtgctggcttggcgtagtatttgagaaaaagaggagttgatcaggcgagattggtcgctatagagcgggttttgattaaactcgataatacgactgaccgcgtggcgtagagcttttgaagggatagttccccagtgagtacaaccaccaccgacttgatcataacgttcaatgacggcgacgcgttttccttgtttaaccagccccatggccgcgccttcaccaccaggacctgaaccgattacaattgcatcgaaatgagaatgttgcataggaagagacctgttttatacaaaacgacaacgacatattaacattagaatgaataatagcccaattgacattaggggcattagtcacactttatttagttttttatctgaatgtgtcgttatggataacggtacgtacttattttctgtaaaaatttgatatattggttataaaccacatttggattatcaggattgctgtgagtaataatattggcatcagagcgaaacaaaaagaaaaaacccgccgttctttgattgaagcagcttttagccaactcagtgcagaacgtagttttactagcctaagcttacgagaagtggcgcgagaagcgggtattgcacctacctcattttatcgtcattttaaagatgttgatgagttggggttaactatggtcgatgaaagtggactgatgctacgtcaattgatgcgacaagcacgacagcgtattgctaaaggtggaagtgtgatccgtacatcggtttctacctttatggaatttattggtaataatccgaatgcttttcgattattgttacgtgaacgctctggcacatctgctgaatttcgtgccgctgtcgcacgagagatccaacattttattgcagaactggcagactaccttgagcaagaaagtaatatgccacgttattttactgaaatgcaggctgaagcgatggtgactatcgtatttagtgcaggggcagaagcattagatattgatattgaaaaacgccaacaattagaagaaagattagtaatacaactacggatgattgccaaaggcgcttactattggtatcgacgtgatttagaaacacctctacaaaataaccccgaaataaagaaaaaaatgcatcagaaaggagataaatgatggaacaaaatcgctgtgaaaaaagcacactattactttccgtagttatcggtgttgctttacatggtagttactcaactttatttaacccacttactggaccttggtctatttttccactgattagtttagttctagctgtttactgcttataccaacgttatttaaatcaaccaatgactgatggtatgcctaagttaattttctcattctttttattagggctatttggttacaatgcttatttaaaaacctctaaccctgaaatgggctctaacttcttctcttctgtatgtattgtgattattgctctatggatctatcgtcaaattaaacagcgtaaacgtctacgtgaacaggaagaagacgctgagaaagcatcgcaagcagagcaatattaattgttatcagcttttggttgtaaacacagcgagattttgacaccagtaagtgcacttactggtgttttgtttttattggggttttagtggtaatttctactataacttctaaaactaaaagttatcttttctccaatagcacaccacattccatatgatgggtgtaagggaattggtcaaaaagtgctaacttgctgattttgtgagttttgatcagcgtttctaaattctggcacagagtctgcggattacaagagatatataaaatgcgcgagtaattcttaaccaactcaacagttttctcatccaaaccactgcgtggtgggtcaacaaaaatagtttcacattggtaatcttgtagattaatcccttctaagcgtttaaattcccttacgccattcattgcttgagtaaaatcttccgctgacatacgaataattttaacattatcaatatggttcatcgcgatattatattgcgctgcatgcactgaaggcttcgctatctcagtggccagcactcgcttaaaattacgtgcaagggcgagagagaaattgccgttaccacaataaagctctaacagatcaccggttgagttttcagtgactgatagtgcccattccaacatcttaatattgacctgtgcattaggttgggtaaagctattttctacttgacgatagatcatctgttgaccagcaacaggtaatacttcatcgacaaaatcattatcgagcataattttagttttatatgcacggccaattaattgcacatcaaacccctgagcaatcaatgtttggcgtaatgctgtcgcttcttgttgccaagtctcatcaatttttttgtgatataacaacgatacaatgattttattgcttaaggttgaaagataatcaatttgaaataatttatggcgcagtgttggtttatcttttatttctgccaataaagctaccatcatctgattaatcagttgactcgccactggaaattggtcaacgcggatacgctgcttagtctcttgatcaaacataatatgatacagagcgtcctgctcatgccagatgcgaaattctgcacgcatacgataatgttgttctggtgatgaaaaaacttccacattaggcgcattaaaaggtgccatcatcttttgtaggcgttcggtcttttcattcagttgagactggtatgtttgcgttggtaatgaattttgcatggtatctcgccttgtttttggcagtaataaagttaagcgagcgaaattgtagagatcctcatgaagatgtccagtattcttcatgttcaatttctggactcagtgaagttggcatcgtagcatagcgattcggtctccgatatggagtgaaaagggaatctggtgcaaagccagaactgacgcgcagcggtaataggatcaaggataataaaagacactgcaatgcaccaaaatcagtgctgtgggaagtcattatcttaaatgctcagagtatttaacctagagtccgaagacctgccgaacatttgtcgcatgtaaaattaagtacgcgttttatttaattttggcggcatcctgctacttatttctgttggatgcagatttcatgaataataaaaaagtattttttctttcaagtgttgctttaagtgttatgacgagcagtttcaacctatttgcacaggctgataatacattgagtgtgactgctaatcgttttcaacaacctacctcctctattttagcgccagtgactattgttgatcgtgaacagatcgatcgctggcagagcaatagtgtgcttgatgtattgcgtagaatgccagggattgatgtagcacaaagtggtggtatagggcagatgagttcagtctttgtgcgaggaactgactcaagacatgtattaatattaattgatggtgtacgtactaaccaagcagggatttctggctcttacgatatgagtcaactgcctctttctttagtacaacgtattgaatatataagaggccctcgttcggctgtttatggctccgatgcgattggtggggtcattaattttataacgaaacgccaaaatgatggtttaacgttaaatgcaggaataggaagccatggatatcaaaattacaatggttcaatacaacaaaaggtaggtgagagaaccacattatctgcggcaggtggatatacttatactaagggaatacatgcaacggatgattctgtccctgttgccgccccttttcatgacagacatggatttatgagtaaatcctattggtttggtatcgaccatatttttaatgataactttcaaggctatatgaaagggtatggttatgataatcgtactacttatgttgcatcttatcccggtaatacagatcaaagtaaaacttataatcgtaattatgaagcgggtattaagttcagtggtgattcctattttagtcaattaattacggtgtatagccaaactaaagactataactacatttcaacaaatggccgtgatggtaagggctcttctgtagataattctaaacaatataatgttcaatgggggaacacctttttaattccaagtggcatgatcagcgcaggaatggattggcaaagacaaacgattgaagcgaattcagcatcagtacctcatcaaagaacaattgataatacagggctatatctcacatctcaaaaacaacttagttcagttatcgtcgaaggcgctattcgttctgatcaccacgatgaatttaactggcatactacatggcaaaccagtgcaagttgggagttcgtcgataactatcgagtaattgcttcttatggtacggcatttaaggctcctacattggggcaactttatgcggataatcctgcatggaacacaaaaggtaatcccaacttaaaaccagagaaaagtaagcagtgggaagtgggcgttgaagggttaactcaagggattgattggcgtttatctctatatcaaaatgatattgataatctgattgcttttagagataacacttacattaattacaataaagctaaaataaaaggtgctgaatgggttggtgagatggatactggattattacatcatcaattaacattgcagtaccttgatgctagagatagtgataataaactattaagcagaagagcaaagcaacagcttaagtatcaagtagattggaatatcgcagatatagatattggaattaattatcaatatataggaaagcgctatgatacggactttaaccaatatcctacgaaaagaataaaactaggtggggtaagtctttgggatttaactgcgtcatatcctattacatctcatctctcaattcgtggtagaatagccaacctgtttgataaagattatgagacagcttatggctatcgcacgccaggacgtgaatatttcctcaccggaagctacaacttctgatgcacaatctaccgctaatcccactgtcttagtttttgactcaggggttggcggtttatctatttatcgagagatccgtgaaaaactgccggatgctcactatatctatgttttcgataatgaagcatttccttatggtgagaaacctcaagagtttattattgagcgtgtcgttcgtatcgtcagtgctgtcgcgcaacagcatgagttagcagcgattgtgatcgcttgtaataccgcaagtacagtaagtctgcctgctttacgtgctaaatttactgatatccccattgttggtgttgttcctgcgattaaacctgcagcaaaacttacctgtaatggtgtggtcggtctattagccacaagagcaacggttaagcgaccttatacccatgaacttatcgaacgctttgcgacggagtgtaaagtgcatctattaggttcagcagagctggtggagttggctgaaaaaaaactgcatggcgaaaaggtgtcatgcgatgagctacgtagaattttagccccttggcttaaaatgaaagagccaccagatacggtagtattagggtgtacccatttccctctattagaagaagagttactttctgttttgcctgatggtactcgaattattgattctggtggtgcaattgcaagaagaactgcgtggttagttgtaaatcaagataaaatcagaggttcaaaagaaattagttttgcttactgtcttaaagaagatgagtatagtgaattattaaaaccggttttagccgattttggctttaaaatgctcagaaaattggcgctttaagttaaatttgttggaaaattaaacggtcggtaaaaaaatcaaaaaaaagtgttgccagcttcacaaaactccctataatgcgccctcgttgtcacggcacagggcgctaagcgaaccggctgagagaacaaaagaaaaagtgaaaagcctgataaattagcgcttgacactgaatgaggaagatgtagaatgcacctcctcgcaacaacgcagaagaccggaaacggcagcgatagttgcactgctctttaacaaattatcagacaatctgtgtgggcactcgcagagacgatatcttctaaaaaattagatgtatcaagtcttgaagagtgactaacaagttaattcatataatgaataagctaagttttcgatttctttgagcatcaaacacttttaattgaagagtttgatcatggctcagattgaacgctggcggcaggcctaacacatgcaagtcgagcggtaacaggagaaagcttgctttcttgctgacgagcggcggacgggtgagtaatgtatggggatctgcccgatagagggggataactactggaaacggtggctaataccgcataatgtctacggaccaaagcaggggctcttcggaccttgcactatcggatgaacccatatgggattagctagtaggtggggtaaaggctcacctaggcgacgatctctagctggtctgagaggatgatcagccacactgggactgagacacggcccagactcctacgggaggcagcagtggggaatattgcacaatgggcgcaagcctgatgcagccatgccgcgtgtatgaagaaggccttagggttgtaaagtactttcagcggggaggaaggtgataaggttaatacccttgtcaattgacgttacccgcagaagaagcaccggctaactccgtgccagcagccgcggtaatacggagggtgcaagcgttaatcggaattactgggcgtaaagcgcacgcaggcggtcaattaagtcagatgtgaaagccccgagcttaacttgggaattgcatctgaaactggttggctagagtcttgtagaggggggtagaattccatgtgtagcggtgaaatgcgtagagatgtggaggaataccggtggcgaaggcggccccctggacaaagactgacgctcaggtgcgaaagcgtggggagcaaacaggattagataccctggtagtccacgctgtaaacgatgtcgatttagaggttgtggtcttgaaccgtggcttctggagctaacgcgttaaatcgaccgcctggggagtacggccgcaaggttaaaactcaaatgaattgacgggggcccgcacaagcggtggagcatgtggtttaattcgatgcaacgcgaagaaccttacctactcttgacatccagcgaatcctttagagatagaggagtgccttcgggaacgctgagacaggtgctgcatggctgtcgtcagctcgtgttgtgaaatgttgggttaagtcccgcaacgagcgcaacccttatcctttgttgccagcacgtgatggtgggaactcaaaggagactgccggtgataaaccggaggaaggtggggatgacgtcaagtcatcatggcccttacgagtagggctacacacgtgctacaatggcagatacaaagagaagcgacctcgcgagagcaagcggaactcataaagtctgtcgtagtccggattggagtctgcaactcgactccatgaagtcggaatcgctagtaatcgtagatcagaatgctacggtgaatacgttcccgggccttgtacacaccgcccgtcacaccatgggagtgggttgcaaaagaagtaggtagcttaaccttcgggagggcgcttaccactttgtgattcatgactggggtgaagtcgtaacaaggtaaccgtaggggaacctgcggttggatcacctccttacctaagagatacgtgttatgtgcagtgctcacacagattgtctgatgaagaacgagcaaaagcgcgtctgcgaagctgacagaagtccccttcgtctagaggcctaggacaccgccctttcacggcggtaacaggggttcgaatcccctaggggacgccaatgcgcggtatgagtgaaaggcgtaccacttatctgacgagagtcagagaataactaagctaattcaaacgagttatcttacttattatgctctttaacaatctggaacaagctgaaaaattgaaaacaaatcaatatatcaacgaggtatattggtgagtctctcaaaatctcaaactttgaatgtgttttgacatcaaagtgggatgagcgagcaatttacagttcgaggcggacagcgcacagcaagcgcagcatacttaagtatgtgagcattgcgagcactgcccaacgaagaaatgtaatctgcgcagccatcaccacccagatagtctttgaaagagacactttcgggttgtgaggttaagcgaataagcgtacacggtggatgcctaggcaatcagaggcgatgaaggacgtgctaatctgcgaaaagcgtcggtaaggtgatatgaaccgttatacccgacgatatccgaatggggaaacccagtatccaatggatactatcattaactgaatccataggttaatgaggcgaaccgggagaactgaaacatctcagtaccccgaggaaaagaaatcaaccgagattcccctagtagcggcgagcgaacggggagcagcccagagtcttaatcaatagcagtgtcaggagaacggtctggaaagtccggcagtaaagggtgatagccccgtatctgaagatgctgttattgtgaactcgacgagtagggcgggacacgtgttatcctgtctgaatatggggggaccatcctccaaggctaaatactcctgattgaccgatagtgaaccagtaccgtgagggaaaggcgaaaagaaccccggcgaggggagtgaaaaagaacctgaaaccgtgtacgtacaagcagtaggagccccatcactcaagtgcctcgcactgagtgatgcaagaacatcaccgaaaatagcgccgaatttgctaacaaggttggtcgattttttcaagccgtcgcgcagtgtacctagaagtacacgagcaacggaagttaaaaaatcgggcaagattgaacgcaaaggcaagcgggacatttgaggatggggtgactgcgtaccttttgtataatgggtcagcgacttatattctgtagcaaggttaaccgtataggggagccgtagggaaaccgagtcttaactgggcgaatgagttgcagggtatagacccgaaacccggtgatctatccatgggcaggttgaaggttgggtaacactaactggaggaccgaaccgactaatgttgaaaaattagcggatgacttgtggatgggggtgaaaggccaatcaaaccgggagatagctggttctccccgaaagctatttaggtagcgcctcgtgaactcatcttcgggggtagagcactgtttcgactagggggtcatcccgacttaccaactcgatgcaaactgcgaataccgaagaatgttatcacgggagacacacggcgggtgctaacgtccgtcgtgaagagggaaacaacccagaccgccagctaaggtcccaaagtcatggttaagtgggaaacgaagtgggaaggctcagacagccaggatgttggcttagaagcagccatcatttaaagaaagcgtaatagctcactggtcgagtcggcccgcgcggaagatgtaacggggctaaaccatgcaccgaagctgcggcagcgacacaaagtgttgttgggtaggggagcgttctgtaagcctgcgaaggtatactgtgaggtatgctggaggtatcagaagtgcgaatgctgacataagtaacgataatgcgggtgaaaaacccgcacgccggaagaccaagggttcctgtccaacgttaatcggggcagggtgagtcgacccctaaggcgaggctgaaaagcgtagtcgatgggaaacgggttaatattcccgtactggtggtaactgcgatgggggaacggagaaggctaggttgtccgggcgacggtcgtcccggttcaagcaggtaggcagagtgattaggcaaatccggtcacttaatgctgagatgtgatgacgaaccaccaaggtggtgaagcaattgatgccccgcttccaggaaaagcctctaagcttcaggttaccaacaatcgtaccccaaaccgacacaggtggtcaggtagagaatactcaggcgcttgagagaactcgggtgaaggaactaggcaaaatggtgccgtaacttcgggagaaggcacgctggcggtaggtaaagtcccttgcggacggcgctgaagccagtcgaagataccagctggctgcaactgtttattaaaaacacagcactgtgcaaacacgaaagtggacgtatacggtgtgacgcctgcccggtgctggaaggttaattgatggggtcagccgtaaggcgaagctcctgatcgaagccccagtaaacggcggccgtaactataacggtcctaaggtagcgaaattccttgtcgggtaagttccgacctgcacgaatggcgtaatgatggccaggctgtctccacccgagactcagtgaaattgaactcgctgtgaagatgcagtgtacccgcggcaagacggaaagaccccgtgaacctttactatagcttgacactgaacattgagccttgatgtgtaggataggtgggaggctttgaagtgtggacgccagtctgcatggagccaaccttgaaataccaccctttaacgtttgatgttctaacctaggcccataaactgggtcggggaccgtgtctggtgggtagtttgactggggcggtctcctcctaaagagtaacggaggagcacgaaggttggctaagcatggtcggacatcatgcggttagtgcaaaggcataagccagcttgactgcgagagtgacggctcgagcaggtacgaaagtaggtcttagtgatccggtggttctgaatggaagggccatcgctcaacggataaaaggtactccggggataacaggctgataccgcccaagagttcatatcgacggcggtgtttggcacctcgatgtcggctcatcacatcctggggctgaagtaggtcccaagggtatggctgttcgccatttaaagtggtacgcgagctgggtttagaacgtcgtgagacagttcggtccctatctgccgtgggcgttggaagattgagaggggttgctcctagtacgagaggaccggagtgaacgcaccactggtgttcgggttgtcatgccaatggcattgcccggtagctaagtgcggaagagataaccgctgaaagcatctaagcgggaaacttgcctcgagatgagtcttccctgtcactttaagtgacctaaaggaacgtttaagactaagacgttgataggctgggtgtgtaagcgtagcgatacgttgagctaaccagtactaatgaaccgtgaggcttaacctgacaacaccgaaagtgttttgtcagagagacgaaacgatgaagtcagcttgtttaagattgaattactggcgacttaccgaaaggaaagaagcgagtgattaaaaccgaatttgcttggcggccatagcgcggtggtcccacctgatcccatgccgaactcagaagtgaaacgccgtagcgccgatggtagtgtggggtctccccatgtgagagtagggaactgccaagcatcaatatttaggctgtgtcagccggtgacaataagccactagtgctgatatggctcagttggtagagcacacccttggtaagggtgaggtccccagttcgaatctgggtatcagcaccataaaaaattattgataactacataaacagatagttatatacagaatttgcttagcggccatagcgcggtggtcccacctgatcccatgccgaactcagaagtgaaacgccgtagcgccgatggtagtgtggggtctccccatgtgagagtagggaactgctaagcattaaataagacgagaaagccaacccaatgggttggcttttttgcatttgtttttctttattcttaatgatcatcacacctagaatattacaggtatctttttaacttactcttattacctaccaacagctcactcgcgctatcctcacagcaggttgactgctaaactaagctatcagctaaatgaggtcgactttcatgaatgaacctatttcattgcaatcatttaatacatttggtttgaaagccaatgctcgtcatatagaaacggcaaagaatacagatgaactctgtcggtactggcaaaatgctcaagaccaaaaactgcctattcttattttaggcggagggagtaatgttctattcattgaagattttaacggtacggtgattagaaactgtatttctggcattgaaattacagaagatgagcaacaatggcatattcatgttggggcaggtgaaaattggcataaccttataaagagcttaattgaaaagcatatttatgggttagaaaatctcgctttaatccctggtaatgttggatctgctcccatacaaaatattggtgcttatggtaaagaattaaaagacgtttgcgcctatgttgatattgttgagttaagcactggtaaagtcacgcgtttaacaaatgaagagtgccaatttggctatcgcgacagtatttttaaacatcactatcagcaaggttatgcaattattgccgttggcttagtgctgaataaacattgggaacctattttgacctatggtgatttagctaaattatcaccagaaacagtcacaccacagatagtattcgactctgtatgcggtatgaggacaagtaaattaccggatcctgctcttacaggtaatgcgggtagtttttttaaaaatcctattgttgatataaaacttgcacaacgcttaaaaagtaaatatccattttgccctcaatatgtacaacataatggtgtaaaacttgctgcaggctggcttattgatcaatgtggtttgaaaggttatcagagcggtggcgctgctgtgcatacaaaacaggcattggtattaattaataaagaaggcaaggcaagtgggcgcgatattgttaatttagcaagttatattcgccaaaaggtatttgaacgttttggagtgcaattagagccggaagtgcgttttattggacggcatggcgagattaacgcggtggatgctatttcatgaaagagacatcaactcctctattactcatcaatatccttgctgatggtgagctccattcaggagaacaattaggcgaaagtttggggatgacacgggcagggattaataagcatatcaagacattgcgtagctggggtatcgacattcatacagtggcaggtcagggttatcagctagatgcaccgatgaacctgttaaacagtgaacgtgtcaatcgaggcattcaaggtgcaccagctcgtgtgataccggttattgattcaactaaccagtatatgatacagcgtattagtgaattaacctccggtgatgtttgtattgctgaatatcaatctgcagggcgtgggcgtagagggcggcaatggatctctccttttggtcgtaatctatatctcagtatgtattggaaattggatcaaggacctgctgccgcaatcgggctaagtttagttgttggtgtgatccttgctgaagttttacagcaatttggtgcgaatggtgtcaaagttaaatggccaaacgatctttacttaaatgataaaaaattatctgggatcttggttgaattaacgggaaaaacaggtgatgttgcgcatattgttactggcattggtattaatatcgccatgagtaacaatcaaaaagatgcaataaaccaacaatggattaatttagagcaggtagggataaaaatagataggaatcagttggcttgtgaaatcaccaatgcgctaagaaaagcatttgtacaatttgaaaaacaggggttatctgcttttattgaacgttggaaaagtttagataattttattgataggcgtgttaaattaattattggtgacaaagagatctttggtatcgctaaaggtattaatgagcaaggggcgttacttttagaacaaaacaataaaatagtaccctatattggtggtgagatctcgctacgaagtgcaccataattggtttattttgctgcaattttcatattaaaatatgctctctaaaataggtaaagagagcatatttaaatttaatccacctatttatagggtgagaattgataatttatctattctctaaataggtaagatttatttacgtaacctaacacttttaaccgaatggttatcacccttagtcataatcaaactggctctttcacgggttggtaaaatattttgctttaggtttaagccattaatttcttgccaaatggaagacgcgatctcaatagattcttcgcgactcagtttggaataattattgaaataggattcgggatcggtaaatgccccttcacggaattttaaaaatcggctgatataccagtgtttcaataatgcttcatctgcatcaacataaatggaaaagtcgacataatctgatacaaaaacattgtgtggatcatgagggtagtcttgattactctgtaatacattgagtccttcaaggatcaaaatatcgggttgctcaatgacctgttttttgtctggaataatgtcatacactaaatgagaatagacaggtgcagtcacttgctttttgcccgatttaatatcagagacaaaagagacaagactatgcatatcataggattcaggaaacccttttttcttcattattccgcgtttttttaattccgcattaggtaataaaaatccatcagtggtaatcaaatccactttccgatgttcaggccaacgagttagcaaagcttgaagtaaacgggcagtcgtacttttacccaccgctacgctacccgctataccaatgatataaggaattttggcgttatttgtgcctagaaactgttctaagacagcctgacgacgtaaatttgaactgatatagaaatttaacaaccttgataatggaagataaatttcaatgacatcatcaattgagatttcttcattaatgcctttaaggtcggcaatttctgtttctgttaatgttaagggaaccgaattccttaacgtagcccactgctttctatcaaattctaaataaggggttgtaaagcgttctttgttattcataagccaacatctgcctagtattcgcaggttggacaggctgtttaaaacacccgtatccgataaaaaataaacagcatcataacgagtgatgtggcagaggcgtagagattttttactttttttctgctttttttgacgcgaactgaataaatttgtaaaaaaagtacaaaaaatagtcataaaaaataaaaataagcgtagaataaaagcgtaaaaataattcttttaggtgaattttactgtttagtgataaatctaggattgtagagagaatattgcgttggattttctttgatttttttgctgtcattttggtcgtttttttcctaaaaaatcaacaatacatacaaaaatgaacaaaatctaagcaaaagaacaaatatcgcaatttttttgttgcatcatgacgaaagtcctcctagaatgcgcaccacttagccggcatagctcagttggtagagcaactgacttgtaatcagtaggtcccgagttcgactcttggtgccggcaccatttaaaatttagatttggtgggatacccaagcggccaaagggagcagactgtaaatctgccgtcacagacttcgaaggttcgaatccttctcccaccaccattaattccttacttaagtgttttcaaatcgtgaacacttgagtagaatacaaagctgattttaagtcaggtagccgagttctgcgggcatcgtataatggctattacctcagccttccaagctgatgatgcgggttcgattcccgctgcccgctccagatgtgctgatatagctcagttggtagagcgcacccttggtaagggtgaggtcggcagttcgaatctgcctatcagcaccactccccaatgttcttgccttcctgattaaaaatcttaacaagcatagctaatcgctagtttaattactgcttggttgatgtggtgtaaccaccgattccgtgtcttagagggacaatttaaatgtctaaagaaaaatttgaacgttcaaaaccgcacgttaacgttggtactatcggccacgttgaccacggtaaaacaactctgactgctgcaatcactacagttttagctaaaacttacggtggtgctgctcgtgcatttgaccaaatcgataatgcaccagaagaaaaagcgcgtggtatcaccatctctacttcacacgtagaatacgatactccaactcgccactacgcacacgtagactgcccaggccacgccgactatgttaaaaacatgatcactggtgctgcgcaaatggacggagctattctggtagtagcagcaactgatggtccaatgccacaaactcgtgagcacatcctgttaggtcgtcaggttggtgttccttacatcatcgtattcctgaacaaatgtgacatggtagatgatgaagagctgttagaattagttgaaatggaagttcgtgaacttctgtctcaatacgatttcccaggcgatgacactccagtaatccgtggttcagcgctgaaagcactggaaggcgaagcagagtgggaagcaaaaattgttgaattagcagaagcactggatacttatatcccagagccagagcgtgcaattgacaaaccattcctgttaccaatcgaagatgtattctcaatctcaggtcgtggtacagtagttactggtcgtgtagagcgtggtatcatcaaagtaggtgatgaagttgagattgttggtatcaaagaaaccgcaaaaacaacttgtactggcgttgaaatgttccgtaaattacttgacgaaggtcgtgcaggtgagaacgtaggtgttctgctgcgtggtacaaaacgtgaagaaatcgaacgtggacaagtactggcgaaaccaggttcaatcaacccacacaacaaatttgaatcagaagtttatattctgagcaaagatgaaggtggtcgtcacactccattcttcaaaggctaccgtccacagttctacttccgtacaactgacgtaactggtactatcgaattaccagaaggcgtagaaatggtaatgccaggcgacaacgtgaacatgatcgttgaactgatccacccaatcgcaatggacgaaggtttacgcttcgcaatccgtgaaggtggccgtacagtaggtgcgggtgttgttgctaaagtattaggttaattcctagctttattatttttgaaaagggcatctgatgatgcccttttttagtttatgcctctattaacgataactagcttattgccattattcattttttattatcatcagcacacttagatagatctgtacgataaatagaaattgaaataacaatgattatcatttactatcttgataggtagttaatgaggtcgttattatgtatgtctgtctgtgtcatggtgtgagtgataaaaaaattatctctactgttcataaacataaaattcgaacaatcaatcaattgcgtcaaatcctacctgtaggcagttgttgtggtaaatgtatacgtcaagctcgtcaacttatagatgatgaacaacacctcctttatcctcaaatttctgaagttgcataacagtttttaatattcctttctctctactttgtataaaaggtctacactaaaaagactggaagcaaaggagcataaaaatgaaaggtgataaaaaaatgatagcccaccttaataaattattaggtggtgaacttgttgcaattaatcagtatttcttgcatgcccgtatgtttaaaaattggggatttactcgccttaatgcgatggaataccatgagtctattgatgaaatgaagcatgctgataaatatattgagcgtattttatttttagaaggtatccctaacttacaagatttaggaaaactcaatatcggtgaagatgttgaagagatgttgcgttcagatcttgaactcgaattagggggagcaaaagacttacgtgaagctatcgcttatgctgattcaattcatgattatgtgagcagagatctgatgctagaaatcttaacggatgaagaagggcatatcgattggattgaaacccaactagagcttattgaacgtatcggactacaaaactatcttcaagcgcaaatgattgaagagtgatctcatcttttagcaaaaaagaagtattaatctttctttattgctatctatcgaatttataaaagcaaaggtaacgctattgttgcctttgccttttattttttaagttcaatttgctgtgactagataatttttatcgctgtttttttattcttggcttgatttcatctctcaggcaagtataatgcgcaggctcactgatttagtggggctgatttatcagctaatgcagatttttttattgcattaatataatactcccgattggggagttatatgcagaacgattacactctctcatcaatcgaaatgggtacgagtagtaatcatttacgtttataaaaaatagttggagctctggtctcatgcagaaccaaagaatccgtatccgcctgaaagcttttgatcatcgtctgattgatcaatcaactgcggaaatcgtagagactgctaagcgcacaggtgcgcaagttcgtggtccaatcccactgccgactcgcaaagagcgtttcacagtgttgatttctccgcacgttaataaagatgcgcgtgatcagtatgaaattcgcactcacaaacgtctggttgacatcgttgagccaaccgagaaaaccgttgatgctctgatgcgtctggatctggctgccggcgtagacgtgcagatcagcctaggttaatcaggtcatcaagcgattgagaggttgaaacaatgattggtttagtcggtaaaaaagtaggaatgactcgtatcttcactgaagatggcgtttcaatccctgtaaccgttatcgaaattgaaaacaaccgtgttactcaggtcaaagatctagagaaagacggttatcgtgcaattcaggtgactacaggtagcaaaaaagcgaaccgtgtactgaaacctgaagcaggtcattttgctaaagctggcgttgaagctggccgcttactgcgtgaattccgtctgaacgaaggcgaagaatacactgtaggtcaaagcattagtgtagaaattttcgctgacgttaaaaaagtcgacgttactggaacatctaaaggtaaaggttttgctggtactgtaaagcgctggaacttccgtactcaagatgctacccacggtaactccttgtctcaccgcgttccgggttctatcggtcagaaccagactccgggtcgtgtatttaaaggcaagaaaatggcaggtcaactgggtaacgaacaagttaccgttcagagcctggaagtagtacgtgttgacgctgagcgcaacctgctgctggtcaaaggtgctgtcccaggtgcaactggcagtgacctgatcgttaaaccagctgtcaaggcgtaacgtcgaggagataggaatggaattggtaatgaaagacgcgcaaggcgcgctgactgtttccgaaactaccttcgggcgtgactttaacgaagcgcttgtgcatcaagtagtcgttgcatacgctgctggtgctcgtcaaggtactcgtgctcagaaaactcgtgctgaagtttctggttcaggcaaaaagccatggcgccagaaaggtacaggtcgtgcacgttcaggttcaatcaagagcccaatttggcgctctggtggtgttagcttcgcagctaaaccacaggaccacagtcaaaaagtaaacaaaaagatgtaccgcggtgctctgaagagcattctgtcagaactggtacgtcaagatcgtctgatcgtcgtagagaagttctctgttgaagcgcctaaaactaagcttttagcacagaaactgaaagatatggctctggaagatgtactgattgtcacagcagaagttgatgagaatctgtatttagcagcacgtaacttatacaaagtagacgttcgtgatgcagcaacaatcgatccagttagcttaatcgccttcgacaaagtcgtcatgactgctgacgctgtgaagcaagttgaggagatgctggcatgatccgtgaagaacgtctgctgaaagtactgcgcgcgccgcatgtatctgaaaaagcttctatcgcgatggaaaaatcaaacaccatcgttctcaaagttgctaaagacgcgaccaaagcagagattaaagcagctgtacaaaaactgtttgaagtcgaagttgaaagtgttaacactctgctgatgaaaggcaaagtgaaacgtcacggtcagcgtattggtcgtcgtagcgactggaaaaaagcttacgtcaccctgaaggaaggccagaatctggacttcgtcggcggcgctgagtaagtcggaggagtaaagaacaatggcaattgttaaatgtaaacctacgtctccgggccgtcgccacgtagttaaagtggtaaacccagagctgcataaagggaaaccttatgcgccattgctggaaaagaacagcaaatccggtggtcgtaacaacaatggtcgtatcactacccgtcatatcggtggtggtcacaaacaggcttaccgtattgttgactttaaacgcaacaaagatggtatccctgcgacagtagaacgtctggaatatgatccaaaccgttcagctaacatcgctttagtgctgtatgctgatggtgaacgccgctacatcctggctccaaaaggcctgaaagcgggtgataaagttcaatctggcgttgatgctgctatcaaaacgggtaacaccttaccaatgcgtaatatcccggttggttctaccgttcataacgtagaaatgaaaccaggtaaaggtggtcagttagctcgttcagctggtacttacgttcaaatcgttgcgcgtgatggtgcttatgtcactattcgtctgcgttctggtgaaatgcgtaagatcccttctgattgccgtgcaactatcggtgaagtaggtaactctgagcacatgttacgcgttctgggtaaagctggtgcaagtcgctggcgtggtattcgtcctaccgttcgcggtactgcgatgaacccagtagaccacccacacggtggtggtgaaggtcgtaactttggtaaacaccctgtaacaccttggggcgttcaaaccaaaggtaagaagactcgtaaaaacaaacgcactgaacactttatcgttcatcgtcgtactaagaaataattagaggataagccatgccacgttctctcaagaaaggtccatttattgacctgcacttgctgaagaaggtagagaaagcggtggaaagcggtgacaaaaagcctgttaagacttggtcccgtcgttcaacgatctttcctaacatgatcggtttgaccatcgctgtccataatggtcgtcagcatgttccagtttacgtttccgacgaaatggttggtcacaaactgggtgaattcgcgccgacccgtacttatcgcggtcatgcagccgataaaaaggctaagaagaaataaggtaggaggaagagatggaaactatcgctatacatcgccacgctcgttcttctgctcagaaggttcgcctggtggcagacctgattcgcggtaagaaagtgtcgcaagctctggaaactctgacctataccaacaagaaagctgctggtttagtgaagaaagtactcgagtctgctattgctaatgcagaacacaacgatggcgctgacattgatgatctgaaagtagctaagatctttgttgacgaaggtccttctatgaagcgcattatgcctcgtgcaaaaggccgtgcagatcgtattctgaagcgcaccagccacatcactgtggttgtgtccgatcgctgagactctggagactagcaatgggtcaaaaagtacatcctaatggtatccgccttggcattgtcaagccttggaattccacatggtatgcgggtaccaatgaattcgctgacaacctagacagcgattttaaagtgcgccagtacttaactaaagaactggcaaaagcatctgtatctcgtatcgttatcgaacgtcctgcgaaaagcatccgtgtgactattcacactgctcgcccaggtatcgttatcggtaaaaaaggtgaagatgtagaaaaactgcgtaaaaacgtagcggatatcgctggcgttcctgcgcaaattaatatcgccgaagtacgtaaacctgaactggacgcaaaattagttgctgacagcatcacttcacagctggaacgtcgtgttatgttccgtcgtgctatgaagcgtgcggtacagaacgcaatgcgtttaggcgctaaaggtattaaagtggaagtaagtggtcgtttaggcggcgctgaaatcgctcgtactgaatggtatcgtgaaggtcgtgtacctctgcacactctgcgtgcagatatcgactacaatacctcagaagcacatactacttatggtgtgctcggcgttaaggtatggatcttcaaaggtgagatcctgggtggtatggctgcggttgaacaggcggaaaaaccagccgctcaacctaaaaagcagcagcgtaaaggccgcaagtaaggagagtcgctgatgttacaacctaagcgtacaaaattccgtaaagtgcataaaggccgcaaccgtggcttagctataggtacggatgtaagcttcgggacttacggtcttaaagctgtgggccgtggtcgtctgactgcacgtcagatcgaagcggcacgtcgtgcaatgacccgtgcagttaagcgtcagggtaaaatctggatccgtgtgttcccagacaaaccaatcactgaaaagccgctcgaagtccgtatgggtaaaggtaaaggtaacgtagagtattgggttgccttgatccagccaggtaaagtcctatatgaaatggatggtgtgcctgaagaagtggcccgtgaagcatttcagctagcggcagcaaaactgcctatcaaaaccacctttgtaactaagacggtgatgtaatgaaagcaaaagagctgcgcgaaaagagcgttgaagagctgaacactgaattgctgaacttactgcgtgagcagttcaatctgcgtatgcaggcagcaagtggtcagttacaacagtctcatctgttgaaacaagtgcgtcgtaatatcgcacgcgttaagactttactgactgagaaggcgggtgcgtaatgaccgataaaatccgtactctgcaaggtcgtgtggtaagtgacaaaatggaaaaatctgttgttgttgctatcgatcgtatggtgaaacatccattatatggtaaattcatccgtcgtacgactaaactgcatgtacatgacgagaacaacgaatgtggcatgggtgacgtagtagaaattcgtcaaacacgtcctatctctaagactaagtcttgggcgttagttcgcgttgtagaaaaagctgttctgtaataaaatagccttttcgtacgaaataaacggctcaaaactgaacgagccgtttattttttctgtccatatcgagaatgtggtgttataatgccgctccctcgtattatgggatattgaacggcctcttctaatgtggaagtggctcagtagtagttgacatttagcggagcactaaaatgatccaagaacagactatgctgaacgtggccgacaactccggtgcacgtcgcgtaatgtgtatcaaggttctaggtggctcgcaccgtcgctacgcagatgtaggtgacatcatcaaaattaccattaaagaagcaattccacgtggtaaagttaagaaaggtgatgtactgaaagcggtagtggtgcgcaccaagaagggtgttcgtcgccctgacggttctgtcattcgcttcgatagcaacgcttgtgtattgttaaacaacaacagcgagcaagttattggtacgcgtatttttgggccggttactcgtgaacttcgtaacgagaagtttatgaaaataatctctctggcacctgaagtactctaaggagcaggcaatggcagcgaaaatccgtcgtgaagacgaagttatcgtgctaactggtaaagataaaggtaagcgcggtaaagtaaaacaggttctttcttctggtaaagttatcgttgaaggtatcaatctggttaaaaaacatcagaagccagtaccggctctgaaccaaccaggtggcatcgttgaaaaagaagctgcaattcaagtttctaacgttgcaatcttcaatgcggcaaccggcaaggctgaccgtgtaggttttagattcgaagacggcaaaaaagttcgtttcttcaaatctaataaagaaactatcaagtaatttggagtatacgatggcgaaactgcatgattactacaaagacgaggtagtccaaaaactgatgtctcagtttggttaccattctgtcatgcaagtccctcgggtcgagaagatcaccctgaacatgggtgttggtgaagcaattgctgataaaaaactgctggataatgcagcagctgatttagcagcaatctcaggtcaaaaacctctgatcaccaaagcacgcaaatctgttgcaggcttcaaaatccgccagggctatccgatcggctgtaaagtgaccctgcgtggcgaacgcatgtgggagttctttgaacgtctgatctctattgctgtaccacgtatccgtgacttccgtggtttgtccgctaaatcattcgatggacgtggtaactacagcatgggcgtgcgtgaacaaatcatcttccctgaaatcgattacgataaagtggatcgtgttcgtggtttggatattaccattactacgactgcgaaatctgatgatgaaggtcgcgcattgttagcagcgtttaacttcccgttccgcaagtaaggcagggcattcatggctaagaaatctatgaaagcacgtgatgtaaaacgtgcgaatttagctgagaaattcttcgcaaaacgcgcagaactgaaagctatcgtttcagatgtaaacgtatctgatgaagatcgttggaatgctgttctgaaactgcaaacactgccacgtgattcaagtccttcacgtcagcgtaaccgctgccgtcaaactggacgtccgcacggtttcctgcggaaatttggcctaagccgtattaaagtccgtgaagccgctatgcgcggtgaaatcccgggccttagaaaggctagctggtaatcaccctaattgaatcacgggagtaaagacagatgagcatgcaagatcccatcgcggatatgctgacccgtatccgtaacggtcaggccgcgaataaagttgcggtcacaatgccttcctccaagctgaaagtggcgattgccaacgtgcttaaggaagaaggttatatcgaagattttaaaattgaaggcgacactaagccagaactggaaatcactttaaaatatttccaaggtaaggctgtagtagaaagcattcagcgcgtaagccgtccaagtctgcgcatctataaaagaaaagatgagctgccacaagttatggcaggactgggcatcgctgttgtttctacctcaaaaggtgttatgactgatcgtgcagctcgccaagcaggtcttggtggcgagattatctgctacgtagcttaattcgggaggaaagaatgtctcgtgtggcaaaagcacccgtcgtcattcctgccggcgtagaggttaaactcaacggtcaggtaattacgattaagggtaaaaacggcgagcttactcgtactatccataatgcagttgaaattcaacatgctgacaaccaactaactttcgcaccacgcgatggttatgctgatgcatgggcacaagcgggtactactcgttcactgctaaatgcaatggttgtaggtgttaccgaaggcttcactaagaaactgcaactggtaggtgtaggttatcgtgcgtctgttaagggcaacacagttaacttatcagtaggttattcacatccagtggaacaccaactgccagcaggcatcactgctgaatgtccaacacaaactgaaatcctactgaaaggtgcggataagcaagtgattggtcaagtagcagctgaactgcgtgcttaccgtcgccctgaaccttataaaggtaaaggtattcgttacgccgacgaagttgtgcgtatcaaagaggctaagaagaagtaaggtaacactatggataagaaagcagctcgtatccgtcgtgcgacccgcgcacgccgtaagctccaggaactgggtgcgactcgcctggtggtacatcgtacccctcgccatatttatgcgcaggttattgcaccaaacggttctgaaactttggtggccgcttctactacagaaaaagctatcattgagcaactgaaaaacactggaaacaaagaagcagcagcagtagttggtaaaattgttgctgaacgcgctctggaaaaaggtatcaaatcagtatcatttgaccgttccggtttccaatatcatggtcgagtccaggcactggcagatgctgcccgtgaagctggccttcagttctaaggtaggagtgtaagatggctcacatcgagaaacaagctggcgaactgcaggaaaagctgatcgcggtaaaccgcgtatcgaaaaccgttaaaggtggtcgtatctttagcttcaccgctcttacagtagttggtgatggtaatggccgcgttggttttggatatggcaaagctcgcgaagttccggcagcaatccagaaagcgatggaaaaagcccgtcgcaatatgaaaaccgtcgctttaaacaacggtactctgttccaccctattaaaggtactcatacaggttctcgcgtatttatgcagcctgctcatgaaggtactggtatcatcgcaggtggtgcaatgcgtgcagttctagaagtggctggcgttcgtaacgtactggctaaaacctatggttccacgaatccgattaacgtcgttcgtgcaacactggacgctttagatagcatgaagtctccagaaatggtcgcagctaagcgtggtaaatccgttgaagaaattctggggtaatgaccatggctaagactattaaaattactcaaacacgcagtttaatcggccgtctgcctaaacataaggcaactatggctggtttaggtctgcgtcgcatcggtcacactgtagaacgcgaagatacaccagcagttcgcggtatgatcaacttggtttcctatatggttaaagttgaggagtaagagatgcgtttaaatactctgtctccggctgaaggtgccaagcatgcgcctaaacgtgtaggtcgtggtatcggttctggcctaggtaaaactggcggccgtggtcacaaaggtcagaaatctcgttctggcggtggcgtacgtcgtggttttgaaggtggtcagatgcctttataccgtcgtttaccaaaatttggttttacttcacgtaaatcattcgtgactgcggaaatccgtctgtctgatttggcttatgttgaaggcgatgtaatcgatctgaatgcactgaaagccgcaaacgttgttggcccacagattgaatttgcaaaattaattctgtctggcgaggttaaccgtgcagtgactattcgtggtctgcgtgttaccaaaggtgcccgtgcagcaatcgaatcagctggcggtaaaattgaggaataagtgacagatggctaaacaaccagggttagattttcagagtgctaaaggtggtataggtgaactaaaacgcagattactgtttgttcttggtgcactaattgtctttaggattggctcttttattcctatccctggtattgatgccactgtgcttgccaaattgctcgatcagcaaaaaggcaccatcattgaaatgtttaacatgttctctggtggtgctcttagccgtgcttctatctttgcgctgggtatcatgccttatatttcggcatcgattattatccaactattatcagtggttaaccctcggttagcggagattaagaaggaaggggaggccggtcgtcgtaagatcagccaatatacccgttatggtactttggtgctggcgatattccaatctattggtatcgcaacaggcttaccgaatatgccaggaatgcaaggtctggttattaatccaggcttaccattctatattacggctgttgtgagcttagtcacagggacaatgttcctgatgtggttaggtgagcaaatcactgaacgtggtattggtaacggtatctcaatcattatctttgcaggtatcgttgcaggtcttccacctgccattggtcaaaccatcgagcaggcgcggcaaggcgaactgcacttcctcctgttattgttggttgcagtattggtgttcgcggtaactttctttgttgtttttgtagaaagaggacaacgtcgtatcgttgttaactatgcaaaacgtcaacaagggcgtagaatatacgcggcacaaagtacacatctaccacttaaggtaaatatggcgggtgtaataccggcaatttttgcttcaagtattattctgtttcctggtacaataacctcttggtttggcgatggtacaggatggggttggctgacgacaatttctttaaatttacagcctggtcaacctatttatgtgttactatacgctgctgcaatcatcttcttctgtttcttctatacggcgttggttttcaacccaagagaaacggcagataacctgaagaagtccggtgcatttgtaccaggaattcgcccgggagagcagacggctaaatatatagataaagtgatgacacgtttaaccttaatcggtgctctgtacattacctttatctgtctcatcccggagttcatgcgtgacgcaatgaaagtacctttctattttggtggtacttccctcttaatcgtggttgtggtcatcatggattttatggctcaagtgcaaactctcctgatgtcaagtcagtatgagtctgcattgaaaaaagcaaaccttaaaggctaattaccgataagatgggtttgttttagaagttacggagagtaaaaatgaaagttcgtgcttccgtcaagaaaatgtgccgtaactgcaaaatcgttagacgtcacggccacgtgcgtgtaatttgcagtgttgaccctaagcataaacagcgtcaaggctaaattattgcatttttttcttgcaaagttcggttgagctggctaaattagccagcccaatcatttataatcatacagtattgtttgagtatcctgaaaacgggcttttcagaatagtactgtataaagttaatttaggagtgcatagtggcccgtatagcaggcattaacattcctgatcataaacataccgtaatcgctttaacatcgatttacggcattggtaaaactcgttcacaggctatctgtgaagcaacgggtattgctgaaaatgttaagatcagtgagctgtctgaagagcaaatcgacaagctgcgtgacgaagttgccaaatacgttgtagaaggtgatctacgtcgtgaagttaccctgagcatcaaacgtctgatggatcttggtacttaccgtggtttacgtcatcgtcgtggtctaccagttcgcggtcagcgtactaagactaacgcacgtacccgtaagggtccgcgtaagccgatcaagaaataatcggggtatttgaacaatggcaaaagcacctattcgtgcacgtaagcgtgtaagaaaacaagtctctgacggtgtggctcatatccatgcttctttcaacaacacaatcgttactattacagaccgtcaaggtaacgcgttgggttgggctactgccggtggttccggtttccgtggttctcgtaaatctactccgtttgcggctcaggttgcagcagaacgttgcgctgaagctgttaaagagtacggaattaagaacttggaagttatggtaaaaggacctggtcctggtcgtgagtcaactatccgtgcattaaacgcggctggtttccgcatcactaatattactgatgtgactccgattcctcataacggttgtcgtccaccgaaaaaacgtcgcgtttaataacggtttcgtttttaggatagttggagaaagaaaatggcaagatatttgggtcctaagctcaagctgagccgtcgcgaaggtacagatttatttctgaaatctggcgttcgggcgattgacaccaagtgtaaactggaacaagcaccaggtcagcacggcgcacgtaaaccgcgtctgtctgattacggtgttcagttacgtgaaaaacaaaaagtacgtcgtatttacggtgttctagagcgtcaattccgtaactactacaaagaagcaacacgtctgaaaggcaacacaggtgagaacttacttactctgttagaaggtcgtctggataacgttgtttatcgtatgggctttggcgcaactcgcgcagaagcacgtcagatggttagccacaaagcaatcatggtaaatggtcgcgtggttaatattgcttcttatcaggtttccccgaatgacgtagtcagcgttcgtgaaaaatcgaaaaaacagtctcgtattaaggctgctttagagctggctgaacagcgtgaaaagccaacatggctggaagttgatgctgctaagatggaaggtgtgttcaaacgtattcctgaacgtactgacttgtctgcggacattaacgagcacctgatcgtcgagctttactccaagtaaggcttagcaccaaagagaggacacaatgcagggttctgtgacagagtttctaaaaccgcgcctggttgatatcgagcaagtgagttcgacgcacgccaaggtgacccttgagccattagagcgaggcttcggccacactctaggtaacgcactgcgccgtattctgctttcgtctatgccgggttgtgcggtaacagaggttgagattgatggtgtactgcatgagtacagcaccaaagaaggtgttcaggaagatatcctagaaatactgctcaaccttaaggggttggcggtaaaagttcatggtaaagatgaagtaattcttactttgagcaaatctggcattggccctgttattgcagccgatatcatccatgacggtgatgtcgaaatcgtcaagccgcagcacgttatctgccaccttacagacgaaaacgcatctattaatatgcgtatcaaagttcagcgtggtcgtggttatgtgccggcttctgcccgaattcattcggaagaagatgagcgccctatcggtcgtttactagtagatgcgtgttatagcccagttgagcgaatcgcttatactgtggaagcagcgcgtgttgaacaacgtaccgacttggataagctggtaatcgagatggagactaacggtactatcgatccagaagaatcgattcgccgtgcagcgactatcctggctgaacagcttgaagcttttgttgacttacgtgatgttcgtcagcctgaagttaaagaagagaagccagagttcgatccgatcctgctgcgcccagttgacgatcttgaattgactgtccgctctgctaactgtctgaaggcagaagcaatccactacatcggtgatctggtacagcgtactgaagttgaattacttaagacgcctaaccttggtaagaaatctcttactgagattaaagacgtactggcgtcgcgtggtttatctctgggcatgcgccttgagaattggccacctgcaagtatcgctgatgaataagatcacaggttaaggttttactgagaaggataaggtcatgcgccatcgtaagagtggtcgtcaattgaaccgcaacagcagccatcgtcaggctatgtttcgcaacatggcaggttctttagttcgtcatgaaatcatcaagacaactttgcctaaagcgaaagaactgcgtcgcgtcgttgagccgctgattactcttgccaagaccgacagcgtagctaatcgtcgtctggcattcgcccgtactcgtgacaacgaagtcgtggcaaaactgtttacagtattaggtccgcgttttgcgagccgtgcaggtggttacactcgtattctgaagtgtggcttccgtgcaggtgacaatgctccaatggcttacattgagcttgttgaccgtgctgattctgaaacagaagcagctgctgaataataaaattattattcagcgaagcgaataaaaagaccggattttttaatccggtttttttattgctatagattagcaataaatttaaatttattggtccctccctttaatgactcgctacttctttatttatgtgggtgctatatatttacttctgaatatgctgctattgtgcgaaagtaagtattgagtatcgcactatatttcaattctatttttttggttatttgttatgcttacttatcattagtttgaggagtgatcaatgtatcgcatcggccaaattgcaaaattagcgaatgttacaacagatactatccgtttttatgaaaaacaaggattgatggaacatgatagacggacagaaggtggctatcgtctgtatacagaacaagatttgcaaagattacgctttattcgttatgccaaagagttaggctttactctggatgctattactgagttactttcaattagagtcgatcctgcgcatcatacttgtgtagaatcaaaacatattgttgatgctaggctagcagaagttgaggctcgtctaaaagaaatggaaaagatgcgtgattctttaaaaatgttaagcaatgcttgctgtggaaccgctcatgaaagtacatattgttcaattctagaaatacttgaatctggagcgacaaagcaataatatctgcactgaagattgttgttctatgctttatgttctttaataatttaagaggtttttatgtctagcaaatatcagcaccaaaaaggtgtgatcaaagataatgcgttagctgcacttgttcatgatcctttatttagacaacgggtagaaaaaaataagaaaggcaaaggcagctatatgagaaaggcaaaacataataagaaaggtaactgggaggccagtgataacaaatattttcaattgttatcactggccttttagtttttatttttgctgattttttaatagatcacggatttctgttaataaagtttcttctgctgaaggtgcaggtggtgctttaggttgttcttcttcttgtctgcgcatcttattaattaatttaatcgcacagaaaatagcaaacgcgacaatggcaaaatcaaaaacagtttgtataaaggcaccatagtttaagataacggcaggtatatccccatgagcttctcttagtactaaactaaattgtttaaaatcgatccctccaatgagtaagcctaatggaggcataatcacatcagctactaaggatgaaacaatttttccgaatgctgcaccaatgatgacaccgactgccatgtcaacaacattgcctttcattgcaaattcacgaaactctttgaaaaaagccataaccaccccttattagtatggatctagatataaaaatatgtgtttagataataataatagatcagtatcagtaacaatcactactattcttatttctacactagagttataagaaaaatggactaggttggaacagtttttctacttcaggaacatattttttatctgtaataaacatgatcacatggtcaccttgttctattgagtgacttgcattggcaataatgacatcttcattgcggacaatggcgccgataattgtgcctggcggaagtttgatatcttgaatacgtctaccgacaacttttgaggtattttcatcaccatgtgcaatggcttcaatagcttcagcaacaccgcgacgtaatgaggagacactgacaatatctgctttgcgaacatgacctaatagtgctgaaatagtggcttgttgcggagagatggcaatatcaatgactccaccttggactaaatcaacataagcactgcgttgaataagtaccatggctttttttgctcccatacgttttgcgagcattgcggacatgatatttgcttcatcatcattagtgagtgcaataaagacatcgatttgctcaatatgctcttcagcgagtagctcttgatcagatgcatcaccataaaacacgatagtatcatggaggagctctgctaactcggtagcacgttgttgattatgctcaatcagcttaacgctataatctttttctaatcttgccgctaatcctgctccaacgtttccgccaccaacaatcataatgcgtttataaggtttttctaatcgttgtagctcactcattactgcgcgaatatgttgtgatgccactacgaaaaagacctcatcacccgcttcaataatggtcgatccttgagggcgaataggtctatcttggcgaaagatagccgcaacacgagtatcaatatgtggcatatgatcacgtagagtggatagtgcattacccacaagtgatccaccatagtaggcttttactgccacgatactgacttgaccttcagcaaagtttactacctgtagggcaccggggtattgaattagtttatagatataatctataacgaggtgttccggggagatgaggtaatcaataggaattgcttctggtaaaaaaagtttatctgcttcacgaacaaattcagaggctcggatacgagcaactttattgggagtattaaataaagtataagcgacttggcatgctatcatatttgtttcgtcagaatttgtgacggcaactagcatatccgcatcttcagcccccgcttctcttaagactctcggatgagatccatgaccatttacaactcttaaatcaaatttatcttgaagttgacgtaaacgggtagcatcagtatcgacaacagtaatatcgttattctcaccgacaagattttcagcgagagtgccacccacttgacctgcgcctaagataataattttcatcgtcagttctcagaatattcgattaacaaatacaagatcaatgtctgttcacatcgatcttgtgttggaatagtagcttcttttagatctgatatcatcttttatcagaagatcattttttgttgatcagcgcataaaagaagccatcaccgctatattgctccggtaagcattgatgctgatagtcacattgagcatcttgcattgacgataagaaggctgcaatttgttggctattttcttccggtaaaatagaacaagtagcataaactaatgtgccgcctgattttaggtatggccatatagcatgtaatatttctttttgaatttgcgctaactgagctatgtcttcattacgacgtagccatttgatatctggatggcgacgtataacgccagttgctgagcaaggagcatcaagtaagatcctgtcaaattgcatatttgcacaccattgctctggataacgtccatcaccacttttgactgtggcatgtagttttaagcggtttagattttctttaactctggctaaacgttgctcatcgatatcaatggcgagaacatgcgctttaggggctatttctaagatatgggttgtttttcccccaggggctgcacataaatcaagaatttgttcgttattttgtggcgctaataattctgcacaacgctgagcgctgcggtcttgaacagtgacccagccctcattaaaccctggtaacaggtgaacattacaaggtgtttctaaacgaatagcattgggatggtggtcatcggagaacgcgctgatcccttctttttcaagcagcgctaagtactgttcacgtgaatgatgtatttgatttacccgtaaccacattggtggcttttggttatttccttcaataatactttcccatagctcagggtaggcgttttttattcgtgtgagtaaccaagaagggtgcaaatagcggctatcattattttggaaacgttccattaatacatcttgttgacgctgaaattggcgtaatacaccgttaattaacccttttaattgtggttttttcagtgcgatcgcaccattaacagtttcagcgagtgctgcatgggcaggaactcgagtataaaggagctgatataaaccgaccataatgaggtaatgtaaaattcgttgtttacctttcagtggtttatccattagttgttggatgatccattctagctggggtaaggtacgtaaggtaccaaagcagagctcttgcaagagcgctttgtctttatctgaaatgtttttttgtaattcagggatcaccgaacttaatgataagccttgatctaaaacttgagctattgcctttgctgcaatactgcgtaagttgtatgacgttttcatagtgaattagcgtttatatattggccgccagagaagaataatattggcgtgaaaaaaggaccccctgaaatattgttatttcaaggggtagtatcattattgaatgattttcccaggggtaaaccaatctcgtttggaatttaggaaatcggctgatgccataggttttttacctgatggttgaagcttggtgatatttaaaatgccttcacctgttacaatataaatgcctgttttatctgctttcaataatgtacctggtatttgattggtattatccgacgcgataacttgcgcttcccatactttcaccggctgatcatcgagcataaaaaagctcataggccatggattaaacgctctaatacaacgttctatctgttgtgcagataacgaccaattaatttttgcttcttcctttgatagcttttctgcgtaattcgctaggctatcatcttgtttttccgcttttaactcaccgctaatgataagatctaatgtattaattagtgctttaggccccagctctgctaatttagcataaagagaagcactcgtgtcttgatgagtaattgggcatgatgctttataaagcatatcgccagtatctaaaccaacatccatttgcataatggtgacgccagtttctgtatcgcccgcccataaggcacgttggataggtgcagcacctcgccatttaggtagaagagagccatggacgtttaagcaacctaaacgaggaatatcaagtactgctttgggtaaaatcataccataagcaacaacaatcataacgtcaggttgtagtgctttgatccactcatgattctcttctggttttaacgatgtcggttgataaacaggaatgttattagttaatgccagttctttcactggattaatagtcagtttcttacctcttcctgcgggtttatctggtggcgttaataccccaacaatatgatgttgagttgataacagagcagctaaatgtcgggctgcaaagtcgggtgttcccgcaaagataatacgtaatgaatcagacacgtttttttcctgttacaagtaaatctctattgtcccgcttttgctcttctcttatcgagcttttcaactttctggcggatacgttggcgttttaatggagataaataatccacaaataatttgccaactaaatgatccatctcatgttgaatacaaatagcgagtaagtcatcagcttctaattcaaaaggttgtccgttgtaatcaagcgctcttacttttacgcgctctgcacgaggcacaaatgcgcgttgttcaggtattgataaacaaccttcctctattccggtatcaccttcctgatcaagaagttctggattaatgagtaccagtttttgatctcgtgtttcagagatatcaatgacgatgatgcgctggtggatatccacctgtgtcgcagctaaaccgataccttcttccaaatacattgtttcaaacatatcatcgacaattttttgaatttcggcatcaactttttcgactggctttgcaatggtgcgaaggcgctcgtctggataatgtaatacgtgtaatactgccataatttatttggactgtttctaaaatgtgaatgagaattaacgtctattctagacatttattgtctggattgacagtatttgctgagtttagcactcaccttgtatgttaaaaaataacactaggataatgcatggatgccagagaaatatggataagacttaatgttgtttcaagattgccagtaaataaagcgattaaggtggtggaatacttacaatcattgacgcaactaaatcgtaaagtgttactagaatgtggcctatcagaacaacaaagtcaccaatttatgaggcttcaggcaaattgtgtcaaaagtacattaaagtggctagataaaaatgaatcatcactcttaacaatttctgattcagattatcctttgctattaaaacaaatatcttctccacctcttttgctttttgttgcaggtaataaagagcatttaaaaagcacacaaattgcattaattggtagtagagatgctacacagtatggaactaagtgggcgacttattttgcacaacagctcgtgaaaaataaattcacaattacaagcgggttggcgcaagggattgatggtgttggacatcgtagtgctttaaaacatcatggcgtcactattgctgtattagggagtggtttagaacaaatttacccatcatttcatcgtcgactagcagagcaaatcaaagagtcgggtgttcttgtttcagagcatctcccgatggcacctcctttagctcgtcatttcccgcaaaggaatagaattattagtggattgagttcagctctcttaattgtagaagctggcataaaaagtggatctttaatcactgccaattatgctctacaacaaggcaaagaattgtttgtgttacccggattactcggtgattcacactttgaaggaaatcatcagttgctaaaacagggggcgaatttagcctcttcgccagatgatattatggaatatttaaatagctctttgcagtggttaatctttaatcataatgatgatttacaggacgagcatatcgcagaggttggctcagctaccaacaataaaaaagagtccagcaatatgccattagaaattgaaaaacttacacccactcaacagcaatcaataaatttgatattgcctttgttaggttttgataaagctatcccgattgatattattgcgaataagagcggtttatccacatcagatttagctcctcttttattagagcttgagcttatcgaaaaagtcgctattgtggcgggtggctatattcgattggaataagtgttatgaggtaagacaatggcaaaaataatgccgtttacgtatccatctgagcaagaaaaatgtcctgaatgtggcagtgatttaattataagaaatggtggtcatggcccttttctaggatgttctgcttatcctaattgccattatattaaggcgttgaaatctcaaggcgatggacaggttattaaagtattagaaggacagccttgccaatgttgtggcgcagatttagttttacgacaaggtaagtttggcatgtttataggctgtagcaattatcctgcttgtgagcatatagaacaaattgataaacctgatgagactgtgattcattgtcctcagtgcgagaagggcaaattattacagcgtaagtctcggtttggtaaaatattttatgcttgtaaccaatatcctgaatgtcaatttgtactaaataataaaccgattaatggtgagtgcgaatattgtcattatccattattgatggaaaagaggtcttctcaaggagtaagattagtgtgcgccagcaaattgtgtggcaagcaacaaacaaaaagagaagaacatgaataacgaagtatcacctgtaaataatacaattatagaagcactgcaaaataatcaagttattgcctatccaacagaagctgtgtttggtgtcggttgtgatcctgatagtgaaagcgcggtaatggcattacttgagttaaaacagagagccattgagaaagggcttattttaattgctgataactatgaacaattaaaaccttatattgatgataacgcattgactcaagaacagcgggagcggatgtttgcctcttggccaggcccaatcacttgggttattccagctaagtcaacaacgccaaaatggctaacagggcggttttcttccttagctgtaagggttacggatcaccctattgtgaaagcattatgtgtggcttatggcaaaccattagtatcaaccagcgcaaatttaagcggacttcctccatgccgtagtgttgaagaagtacaagagcagtttcgtaatcgaattgctattgtaaatggcgaggttggtggcagaaaaaatccttctgaaattagagatgcactcacaggtgagctatatcgacaaggataatgatgctatggaaaaatatgtagtgatgggcaatcccattgaacatagtcaatctccttttattcatcagcttttttcgaaacagtcagggattgattatgaatatgggcgtttactggttccattaggcgaatttgataaagtagcaacgcaatttttttctcaaggtggacgtggagctaatgttaccgttccttttaaggaagatgcttttcgctttgtggataaattaacacaaagagcacaagcctgtggtgctgttaatactattttaaaattagatgacggcacgttattaggtgataatactgatggtcagggcttaattcttgatttagctaggttggattttattatccccggaaaaatattatcggttcttgttattggggctggtggtgctacacgagggatattattaccattattaaattataattgtgatattactttgactaatcgcactgttgaaaaagcacaacaattagcacaagaatttagccaatttggtacaattagagctagtgctccacaaaatgttacagataaacattatgatctaattattaacgcctcttcatctagtatgacggacgatattccacctatacctgatagtgcttatggttttaaaactgcttgttatgatttgtattataaggcaggtatgacttcttttttataccatgcattaaaaaatggtagtacacgcttatctgatggcctaggtatgctggtagggcaagccgcttatgccgttgagttatggtatgagcgagtacctgatattaatccaacaataaatattttaagagaaaatttgaataaatgaatcaatccattcaatttcctgatcgtgagcagtggcttgaagatcaaaatagcgttcttttccctatcatggtcaatggaatgttatttgattgccaaatcaccgaacaagagctaaaggcacgctttggtgataatagtaatggtctttgtttgtttaaacagcatcgatgggaaattgaagaagaatttgaagagttggctaagctgtatgaagtgtcaactcttcatccattttactgtttatcaatggcggaatgagccgttgataaatagtcgttcttccactttacgtaattattagcagagtagataaagtgttgtatttctgcgggcgtgagtgggcggatcttttttactgggctacctaaataaagaaaaccactttctagtcgtttacctggtggtactaggcttcctgcgccgatcaagacattatcttcaataattgcaccatcaagtaaaattgatcccatgccgactaatactcggtttccgattgtacacccatgtaacattgctttgtgtccaacagtcacatcatcaccgatgatgagaggaaaaccattaggggtattttctgatgcatgtgtaacatgtagcactgagccatcttgaatattagtccttgctcctacactgacatagttaacatcaccgcggatcacaaccattggccaaatgctgacatcttcactaaggcgtacatcaccaataacggtggctgtcacgtcaatataaacatctttagcaatggaaggtgataagtgtaagtaacttctaatagtggaatggctcatgattgacctcatacgaatattgtggcggtactttgctgtaattgtaatatagaaaagcatagcagtgagcaggtatatctgacgagagaataatccagagtattatttttaactgaaataaatagcgatgataataaaagtaagtggatcgatgatgatcgatagaagataacgaatagacaaaacggttattgctagtataatttttgtgctactagcggggttttagtgtcaaaaatagacgtgtagcttaaaaatagagcgaacagaaaaaaaattgaaataaatacttgcgctaatctgagaagcccctataatgcgcacccactgaccgacgatgagctgacaacagcaacgacggaaagggaagagaaaagaaaaaagtttgaaaaaactcttgactcttcagaggaatagcgtaatatacgcctcctcgcaacaacgcagaagaccggaaacggcagcgatagttgcactgctctttaacaaattatcagacaatctgtgtgggcactcgcagagacgatatcttctaaaaaattagatatatcaagtcttgaagagtgactaacaagttaattcatataatgaataagctaagttttcgatttctttgagcatcaaacacttttaattgaagagtttgatcatggctcagattgaacgctggcggcaggcctaacacatgcaagtcgagcggtaacaggagaaagcttgctttcttgctgacgagcggcggacgggtgagtaatgtatggggatctgcccgatagagggggataactactggaaacggtggctaataccgcataatgtctacggaccaaagcaggggctcttcggaccttgcactatcggatgaacccatatgggattagctagtaggtggggtaaaggctcacctaggcgacgatctctagctggtctgagaggatgatcagccacactgggactgagacacggcccagactcctacgggaggcagcagtggggaatattgcacaatgggcgcaagcctgatgcagccatgccgcgtgtatgaagaaggccttagggttgtaaagtactttcagcggggaggaaggtgataaggttaatacccttatcaattgacgttacccgcagaagaagcaccggctaactccgtgccagcagccgcggtaatacggagggtgcaagcgttaatcggaattactgggcgtaaagcgcacgcaggcggtcaattaagtcagatgtgaaagccccgagcttaacttgggaattgcatctgaaactggttggctagagtcttgtagaggggggtagaattccatgtgtagcggtgaaatgcgtagagatgtggaggaataccggtggcgaaggcggccccctggacaaagactgacgctcaggtgcgaaagcgtggggagcaaacaggattagataccctggtagtccacgctgtaaacgatgtcgatttagaggttgtggtcttgaaccgtggcttctggagctaacgcgttaaatcgaccgcctggggagtacggccgcaaggttaaaactcaaatgaattgacgggggcccgcacaagcggtggagcatgtggtttaattcgatgcaacgcgaagaaccttacctactcttgacatccagcgaatcctttagagatagaggagtgccttctggaacgctgagacaggtgctgcatggctgtcgtcagctcgtgttgtgaaatgttgggttaagtcccgcaacgagcgcaacccttatcctttgttgccagcacgtaatggtgggaactcaaaggagactgccggtgataaaccggaggaaggtggggatgacgtcaagtcatcatggcccttacgagtagggctacacacgtgctacaatggcagatacaaagagaagcgacctcgcgagagcaagcggaactcataaagtctgtcgtagtccggattggagtctgcaactcgactccatgaagtcggaatcgctagtaatcgtagatcagaatgctacggtgaatacgttcccgggccttgtacacaccgcccgtcacaccatgggagtgggttgcaaaagaagtaggtagcttaaccttcgggagggcgcttaccactttgtgattcatgactggggtgaagtcgtaacaaggtaaccgtaggggaacctgcggttggatcacctccttacctaagagatacgtgttatgtgcagtgctcacacagattgtctgatgaagaacgagcagagataccggtataggcttgtagctcaggtggttagagcgcacccctgataagggtgaggtcggtggttcaagtccactcaggcctaccacttttcctttatgctgtgttgtgaagcaactcgtttacattaagtaaacttcgttactccacgccttgcctaaagaaaaagcttcttattataagaagaaaaaggagtggttatacgggtattgaaacattatggggctatagctcagctgggagagcgcctgccttgcacgcaggaggtcagcggttcgatcccgcttagctccaccataatctcttgaatataaaacaatgattcagagtatattaggaatagtatactgcgaattattatgctctttaacaatctggaacaagctgaaaaattgaaaacaaatcaatatatcaccgaggtatattgatgagtctctcaaaatctcaaactttgaatgtgttttgacatcaaagtgggatgagcgagcaatttacagttcgaggcggacagcgcacagcaagcgcagcatacttaagtatgtgagcattgcgagcactgcccaacgaagaaatgtaatctgcgcagccatcaccacccagatagtctttgaaagagacactttcgggttgtgaggttaagcgaataagcgtacacggtggatgcctaggcaatcagaggcgatgaaggacgtgctaatctgcgaaaagcgtcggtaaggtgatatgaaccgttatacccgacgatatccgaatggggaaacccagtatccaatggatactatcattaactgaatccataggttaatgaggcgaaccgggagaactgaaacatctcagtaccccgaggaaaagaaatcaaccgagattcccctagtagcggcgagcgaacggggagcagcccagagtcttaatcaatagcagtgtcaggagaacggtctggaaagtccggcagtaaagggtgatagccccgtatctgaagatgctgttattgtgaactcgacgagtagggcgggacacgtgttatcctgtctgaatatggggggaccatcctccaaggctaaatactcctgattgaccgatagtgaaccagtaccgtgagggaaaggcgaaaagaaccccggcgaggggagtgaaaaagaacctgaaaccgtgtacgtacaagcagtaggagcctctttatggggtgactgcgtaccttttgtataatgggtcagcgacttatattctgtagcaaggttaaccgcataggggagccgtagggaaaccgagtcttaactgggcgaatgagttgcagggtatagacccgaaacccggtgatctatccatgggcaggttgaaggttgggtaacactaactggaggaccgaaccgactaatgttgaaaaattagcggatgacttgtggatgggggtgaaaggccaatcaaaccgggagatagctggttctccccgaaagctatttaggtagcgcctcgtgaactcatcttcgggggtagagcactgtttcgactagggggtcatcccgacttaccaactcgatgcaaactgcgaataccgaagaatgttatcacgggagacacacggcgggtgctaacgtccgtcgtgaagagggaaacaacccagaccgccagctaaggtcccaaagtcatggttaagtgggaaacgaagtgggaaggctcagacagccaggatgttggcttagaagcagccatcatttaaagaaagcgtaatagctcactggtcgagtcggcccgcgcggaagatgtaacggggctaaaccatgcaccgaagctgcggcagcgacacaaagtgttgttgggtaggggagcgttctgtaagcctgcgaaggtgtactgtgaggtatgctggaggtatcagaagtgcgaatgctgacataagtaacgataatgcgggtgaaaaacccgcacgccggaagaccaagggttcctgtccaacgttaatcggggcagggtgagtcgacccctaaggcgaggctgaaaagcgtagtcgatgggaaacgggttaatattcccgtactggtggtaactgcgatgggggaacggagaaggctaggttgtccgggcgacggtcgtcccggttcaagcaggtaggcagagtgattaggcaaatccggtcacttaatgctgagatgtgatgacgaaccaccaaggtggtgaagcaattgatgccccgcttccaggaaaagcctctaagcttcaggttaccaacaatcgtaccccaaaccgacacaggtggtcaggtagagaatactcaggcgcttgagagaactcgggtgaaggaactaggcaaaatggtgccgtaacttcgggagaaggcacgctggcggtaggtaaagtccctcgcggacagagctgaagccagtcgaagataccagctggctgcaactgtttattaaaaacacagcactgtgcaaacacgaaagtggacgtatacggtgtgacgcctgcccggtgctggaaggttaattgatggggttagcgcaagcgaagctcctgatcgaagccccagtaaacggcggccgtaactataacggtcctaaggtagcgaaattccttgtcgggtaagttccgacctgcacgaatggcgtaatgatggccaggctgtctccacccgagactcagtgaaattgaactcgctgtgaagatgcagtgtacccgcggcaagacggaaagaccccgtgaacctttactatagcttgacactgaacattgagccttgatgtgtaggataggtgggaggctttgaagtgtggacgccagtctgcatggagccaaccttgaaataccaccctttaacgtttgatgttctaacctaggcccataaactgggtcggggaccgtgtctggtgggtagtttgactggggcggtctcctcctaaagagtaacggaggagcacgaaggttggctaagcatggtcggacatcatgcggttagtgcaaaggcataagccagcttgactgcgagagtgacggctcgagcaggtacgaaagtaggtcttagtgatccggtggttctgaatggaagggccatcgctcaacggataaaaggtactccggggataacaggctgataccgcccaagagttcatatcgacggcggtgtttggcacctcgatgtcggctcatcacatcctggggctgaagtaggtcccaagggtatggctgttcgccatttaaagtggtacgcgagctgggtttagaacgtcgtgagacagttcggtccctatctgccgtgggcgttggaagattgagaggggttgctcctagtacgagaggaccggagtgaacgcaccactggtgttcgggttgtcatgccaatggcattgcccggtagctaagtgcggaagagataaccgctgaaagcatctaagcgggaaacttgcctcgagatgagtcttccctgtcgctttaagcgacctaaaggaacgtttaagactaagacgttgataggctgggtgtgtaagcgtagcgatacgttgagctaaccagtactaatgaaccgtgaggcttaacctgacaacaccgaaagtgttttgtcagagagacgaaacgatgaagtcagcttgtttaagattgaattactggttatagactgtgataacagaagataacgggtaattgaaaccgaatttgcttggtggccatagcgcggtggtcccacctgatcccatgccgaactcagaagtgaaacgccgtagcgccgatggtagtgtggggtctccccatgtgagagtagggaactgccaagcattaaattaaagccttagtgtaaaaagacattaagtgcgtaaagaataagcggagcggtagttcagttggttagaatacctgcctgtcacgcagggggtcgcgggttcgagtcccgtccgttccgccaactatttaggggcgtagttcaattggtagagcaccggtctccaaaaccgggtgttgggagttcgagcctctccgcccctgccagttaccaattaagtaataacaaaatttatactactttgtagcccagttaattaactgggctttttgttatataaaaaccactatatttttctccaatccttccaactcttccaatcctaaatcgtatttataactctatgtatcatccaaatgattaatctaacattattcacataatatttttctgggtattgagtctgttattagtaataacatgtgcttcaatcatcaattttattactgatatatcaatttgactgaagcacaatgctactgatggttggagacaggttgagaaagtagttgctgaattaacacttgttgatcactggtattgagccatacagcaaatagcggtttttggatgatctctactgctgctggtgagagatcgggatataaatcgagccaatgagtaggtaaaaaagcaacggcatttgttgttttcattaactgataggcaatcatagctgaatttgttgtcaaaataggttctgtttttggtgcagagctattttgtgaaagtggtgacaaatcagcactccactcaattttgataaattgtgcgctttgctggttcaggtgtgatgctcttttcattagttgaaatgtgatattgccaattactttactttccaactcatccattttgggtgcttctgtagtaaaaagcagatctagctcacgagcatgaagttgctttactagagattgccttgtagagactctagattcaattctaagctcatttctttctaagtaagcctcttgtagccaagaggttagataagcgtcccagagcgatgctgtcgcaccaattgaaagttctgagtgttgggaggcgtggctaatttctttttttgcctgtaaccaggtattcattaatgactcagcataagggataagcctttctccagcgagtgttaagcgaatattgttacgatggcgagtaaacaaatttgtcccaagttgggtttctaattggcgtattctaaaactgaccgcagactgtgttaaataaagagattcagcggctcggccaaagtgtcttgtcttactgacttccaaaaaggttttcagtaattcggtatccacatctatctccaaaaaaatttgtcgttacgatttaaatattttgttttacagaaccgcatgactccctaatactccgcgccataagtatgacgatagagaattaggagtgtgtcagatggcagaaagttttatcacgactaatcgtttttttgacaataaacattatccgcgtggtttttctcgtcatggcgatttcactatcaaggaagcccagatattggaacgtcatggtcaagctttcaatgaacttgatttaggcaaacgagagcctgcaactgaagcggaaaaattatttgttgccatgtgtcgtggcgaacgagaagcagctactgttgaagaaaaaatttggaagaaatataccagtcgtataagtcgtccaaaacgttttcataccttatcgggtggaaagccacagctcgatccatctgatgactataccgattctgatgattaatatcattagttttaatttaaaaggggcgtatttcgctccttttttacttacccttctaactgtttttgtaaatagatcatcagtctatccatggcgcgaaaactcaacgcttcaataagatgatttcgttgtattttttgctcattctcaagatcggcaatagttctcgaaactcttaaaattttgtgccatgcacgaatagataagcctaatttattcaatgtctcttcaagaaagagtgcatctttggtatgtaattgacaaaaatgttcaatctctttacttgataaataagtattaagcttgccacttcgctggaactgacgttctctggcttgtaaaactcgagctcgtatgatgctactcgattcatttgtatgagtcgattgtagtagtgcaccttgaggtaataatggcatttcaacggataagtcaaacctatctaaaaaaggtcccgatactttgcttaaataacgtaatacttgttttacgggcgttcgattatgagtaccttgatagtgccctgtaggacttggatttaatgcaccgacaagtaacacatttgcgggatagctaattttggctttagcgcgtgaaatggtaattttgcgcgcatcaagaggctctctaagtgcatctaacacacgtctatcaaattccggcaattcatctaaaaataaaatgccatggtgtgcaagtgtaatttcaccgggtttaggaatagatccacctccggttaaagcaacggcagatgccgtatgatgaggtgctctaaaaggacgtaaaggccatttaccatcatgatgtatcgtatttgataggctactgataattaatacatcaagggcttctttagctgtaagtggaggtaagagagtattaatgcgttgtgccaacattgtttttcctgtgccaggagggccaagaaataaaatgttgtgatttcctgctgcagtgatttctgcagctctttttgcgttattttgtccaataatatcactaatatctttattattttggttttcaattgttttgtgattaatattgtttttagcttcaattaatggagtgttattttctaaatgatgacaaatatccaaaagatggctagctaataacgcggatttattaggtaagagcgaaacttctgattgatgttcaatagaaatgatagatattctattatctttgttggcgcttaaaattgagggaataaccgcattcactttttgtaatttaccggaaagtgcaagctcaccgataaattcataactatttaatttatcagagattaattgctctgaggcaattaagatagctaacgcaatgggtaaatcatagcgggctccttctttaggtaaatcagcgggtgaaagattaatcgtaattctttttgctggataactatatccactatttattaatgcgcttcttaccctatctttcgcttcttttacgacagtttcaggtaaaccaactaaagtgagtcctggtaatccctggctaatatgagcctcaatagtaataagtggtgcagagatccctaatgaggctcgcgtatatattactgctaatgccatttttttattctccattattttctctctttttaatttatttttattgaggtgttaaataagaagttaattaaatgagagatatctcgtgaatatttaatatattgaaaaatatagaaaataaataaagttaaaaaataattattggatgaaaaattattatttatacgaaactttttatttttgaatttaattatttctattaacagaacaaatagtaaattaatggtttttctttcagtattaaccactgcaatataattattaagcagtgttatactctggcgtgtgacggagagataaaaatagctatatgtttcatgtggttagaattattttaaaaataatcattgtcaacatgaaaatatcatggtaactctaaaaggacagagtgaaagagaacacaacacagactattttttactacagaaaaagaattttaatattatgaatactatcgtcctagtgattagcctaattattgtcagcgtggtggtgattattaacccactgtgcggggttgcactaggacgaagaaaggctaactaaactagccggatctcagaaaaacccccgcaccgaaaggcgcgggggttttttttgagccaaggattttaaagagaataaaaaagaaaataaattaatattaaacaagaagttaagacgcagggtgaaagaatgaatggagcacagtggttagttcaagcattacgaaaacagcgagtggaaacggtctttggttatcctggcggtgcgattatgcctgtgtatgacgcactctatgatggcggtgtcgaacatgttttgtgtcgtcatgaacagggagccgctatcgctgctattggatttgctcgttctaccggtacaactggtgtctgtatcgcgacatcaggcccaggcgctactaatgtcatcacaggtcttgctgatgcattgttagattctgtgcctgttgttgctatcacagggcaagttgcttcaaatttaatcgggacagatgcttttcaagaggtggatgtacttgggctctctttagcatgcaccaaacatagttttctggtttctgatgtgaatgaactgccaagagtcgtatcagaagcattttcgatcgctaagcaagggcgtccaggccctgtgttaattgatattactaaagatgtgcaattagcagatgcttcacatttagctgatcatccattgccacaagagcaagagtttccctatcccgaacacgaaatcgcgcaggctctgcagatgttagcacaagcgaaaaagccgattttgtatgttgggggcggtgtagcaatgagccaaggtgttgaggcgctaagatcttttgtaaaacagacgcaaatccccgttgtttcgacattgaaggggttaggttgtgctaatgcatttgatgccaattatttaggtatgttgggtatgcatggtacaaaagctgctaattatgccgttcaacgtagtgatttattaattgctgtaggcgctcgttttgatgatcgcgtaacgggtcgtttaaatacttttgcacccaatgcaaaagtgatccatatcgatatcgattacgcagagcttaataaattaaaacaagcccatattgctttgttaggtgatgccaaagtgttattacctaagttatctcaaccgttagctattgaggcatggcaagaagaggtacagcaattaatcgctgaatatgcttggcgctatgatcatcccggtgaagcaatttatgctcctttgttgttaaaacagttatctgatgctaagcctgaaaatagcattgtgacaacagatgttggacagcaccaaatgtggtcagcacagcatatgacatttgatgcgccagaaaattttattacttctagtgggctaggcacgatgggatttggtatccccgcggctattggtgcgcaaatagctagacctgatgcgtgtgttatctgtgtctctggtgacggctcttttatgatgaatgtgcaggagttaggcaccattaaacgtaagcaattacctattaaattggtgttattggataaccagcggcttggtatggtgcgccaatggcaagagctgttttttgagcaacgttatagtgaaaccattttaacggacaaccctgattttgttgctttggcaaaagcttttgatattccggggcagcgtattacagaaaaagcacaggttgctgaagcaattaaatgtttattaaccagtgatggcccttatttattacaggtatctatcgatgatgcagagaatgtctggcctttagtcccgccgggcgcaagcaatgatgagatgatggagaaatcaaaatgaaccaacacaatatcacaattgaagcccgtttttgtccagagatcttagaacgtatcttgagagttatccgccaccgtggttttcatatatgctcaatgaatatgaatatcacagaaagtaactatattaatttagctctgactgtgagcagtcaacgacctgttgatcttttatgtagccagttaacaaagttagctgatgttgcaggtattcaggtcttacatcaacaacaaaaagaaaaattacaattcataagtgcacttagtgccatgtaaggatagaagaatgacaaagcaagctgattatatttggtttaacggtgaaatggttccatgggctgaggcaaaagtacatgtcatgtctcacgcactacattatggaacgtctgtatttgaaggagtacgttgctacgattcccataaagggcctgtcgtttttcgccatcgtgagcatatgcaacgattgcatgattctgccaaaatttatcgtatgcctgtcgcgcaaagtgttgatgagttaatggaagcttgtcgcgaaacattgcgcaaaaaccagttagtcagcgcttatattcgtcctttagtttttattggtgatgtcggaatgggggttaatccaccagaaggttataaaaccgatatcattattgctgcattcccatggggggcatatttaggtgaagaggcgttagataaagggattgatgcgatggtctcttcttggcatcgagcagcacctaatactatcccgacggcggccaaagcaggaggtaattatctctcttcattgttagtgggcagtgaagctcgtcgccatggttatcaagaagggattgcattagatgttcatggttatctttctgaaggggctggtgagaacttatttgaagtaaaagatggcgttatttttactcctccatttacctcatctgcgctaccggggatcactcgcgacgcaattattaaattagcgaaagatctcggttatgaaattcgtgaacaagtactgtctcgagaatctctctatcttgctgatgaagtgtttatgtctggtaccgctgcagaaattacaccagttcgtagcgttgatggtattcaagttggtattggtcgctgtggtccagtaacaaaagctattcagaaagctttctttggtttgtttacgggtgaaaccgaagacaaatacggctggttagatcctgtcaatccataatcataattaaatacatttattgagcgagtagttcgttccctactcgctgttattatcgcaggagtgtgaaaaatgcctaaataccgttcagcaacaacgacacatggtcgcaacatggctggcgcccgcgcattatggcgtgcaacaggaatgactgacgctgattttggtaaacctattatcgcagttgtaaattcatttactcaatttgtacccggtcatgtgcatttgcgggatttaggaaaactggttgcagagcaaattgaagctgcgggtggtgtggctaaagaatttaatactattgcggtggatgacggtatcgcgatgggacatggtggcatgctttattcgttaccttcccgtgagttaattgctgattctgtggaatatatggtcaatgcacattgtgcagatgccatggtatgtatttctaactgcgacaaaatcacaccgggtatgctgatggcgtctttgcgcttaaatatcccagtcatttttgtttctggtggaccgatggaagcgggtaaaaccaagctttctgatcaactgatcaagttagatctggttgatgcgatgatccaaggggctaatcctaatgtcagtgatgctgatagtgaacaaattgagcgttctgcttgccctacatgtggatcatgctctggtatgtttacggcaaactcaatgaattgtttgactgaagcgttaggattatcgcaaccgggtaatggttcattattagcaacccatgctgatcgtaaaacattatttattaatgcgggtaagcgtattgttgaattaactaaacgttattacgaacaagatgatctatctgcattaccacgtaatatcgctaaaaaagaagcatttgaaaatgcgatgatcttagatatcgccatggggggatcaacaaataccgttttacatctattagctgccgcgcaagaaggtgatgttgattttaagatggaagatatcgacagactttctcgccaagttcctcatttatgtaaggtggcaccaagtacccaaaaatatcatatggaagatgtgcaccgagcaggtggggtgatggggattttaggtgaattagacagagcaggattacttaatcgcaatgttaataatatcttaggcttaagtttgcctgaaacattagcacaatatgatgtgatgctaagccaagatgagcaagtgaaatcaatgtaccaagccggtcccgcaggtattcgtaccacaaaagctttttcacaagattgccgttggccgactttagataccgatcgtgaacaggggtgtatccgaagtaaagcgcatgcttatagccaagatggtggtttggccgtgttatcaggtaatttagcgcaagatggctgcattgttaaaaccgcgggtgtggatgaagataatttagtgtttagtggccctgctaaagtatacgaaagccaagatgatgcggtagaggcaattttaggtggcaaggtcgttgcgggtgatgtggtcattatccgttatgaaggcccgaaaggggggcccggtatgcaagaaatgctctatccaacctcatatttaaaatcaatgggattaggcaaagcgtgcgcattaatcacggatggacgtttttctggtggaacctcggggttatctatcggacacgtttcaccggaagcggcaaatggtgggatcattggtttagtggaagaaggggatattgttgatatcaatattccaaatcgcgaaattaacttacgggtagatgagaaaacactagcagcccgtcgtgaagcacaacttgctcgtggagataaagcgtggacacctaaagataggcagcgccaagtctcttttgctttacgtgcctacgcgtctttagcaaccagtgcagacaaaggtgctgtacgtgacaaatctaaactagggggctaactcatggcagcctttagacctttaacttcagcacccagtagtgctgaatatttaaaagccgcattaagtgcgcctgtttatgaagctgctgtcgtgacacctttgcaagagatggcaaaaatttctcagcgtttagaaaataccattttagttaaacgagaagaccgacaaccggtgcatagctttaaactgcgtggcgcttataacatgattgcagggttaacgccggagcaaaaggcaaaaggggtggttactgcatcagcgggaaatcatgcccaaggggtggcattatcagctaatcgaatgggcgtaaaagcattaattgtgatgcctattgcaacggcggatatcaaagtggatgccgtacgccagtttggtggtgaagcattgttgtatggggctaactttgatgaagcaaaagcaaaagccatcgctttggcaaaagagatgggatatacctttgtgcctccttttgatcatcccgccgtgattgcagggcaagcaacattagcaatggagctgttacaacaagacgtccatcttgatcgtatttttgtgcctgttggcggcggcggtttaattgctggggttgctgtattaattaaacaactgatgcctgaaataaagatcattggtgttgaggcagaagatgctgcttgtttaaaagcagcgttagaagcaggacatcctgttgagttacctcgcgttggattatttgccgaaggtgtcgctgtcaaacgtattggcgatgaaaccttccgtttatgccaaaagtatgttgatgatgtgataaccgttgatagtgatgcaatttgtgccgcagtaaaagatctgtttgaagacgtacgcgctattgcagagccttctggtgctttagcattagcagggctaaaaaaatatgttgaggagcatcagatcaaaggggaacgtttagcccacgtactttctggcgctaatgtcaatttccatggcttacgttatgtttcggaacgttgtgaactaggtgaaaaacgagaagcgctatttgccgttacaattcccgaacaaaagggtagttttttgcgtttttgccaaattttaggacaacgtgttgttactgaatttaactatcgttatagcgatgccgatccagaaaatgcacgtatttttgtcggtgtgcgtttaagccaagggctacaagagcgtaaggaaatcgtgcaacagctaacggaggcgggttatcaagtctccgatctctccgatgatgagatggcaaaattgcatgtgcgttatatggtcggtggtcgccctaatcagccattaaaagagcgtctgtttagctttgagtttccagaagcaccgggtgcattaatgaagtttcttaaaacattagggacttactggaatattacgctatttcattaccgaagccatggtactgattatggccgtgtgctggtggcgtttgagttacctgaaacggaagggcgttttgaacgacatttagatgcgttaggttatgaatatcatgatgagacaggaaatccgtcttttcagttatttctttcaccacaaacagccagcttagtggtggagtaggcgccaaaacgcactgatcacaggctcttgaaggcgtttgtgtaaaccacaaacgccaagttcaaagggttctaccagtgatatattatcgagcaaagagatacggtttcgtaccggctcagggcagttatcgacgacaacttgcggaataagtgcgataccacaaccaagagcaaccattgaaacaatcgcttcatgccctgaaacagtggcataaataagaggattttgaattcgatggcgtttaaaccataaagcaatgcgctgtcgtgatgggccgtgttcaggaatgataaagggaatattgagccaatccggtttttcttgtgtagcaaggtgtcgaacattacccggtagagcaggggcaataagaactaaggggatctcgcctattttctcaaagcagatattttcaggcaacttctctggctttcctgcaatacctaaatcggcttcatctgagataactttatccacagcatctgcggcatcaccggtagtcaattttatctcgactaagggattttctgcacgaaaacggtcaaggatcggcggaaggtgactataagctgcagtgactgaacaaaatagacgtagctctccagataagctaggactgttctggtttagcgtatgtttgagttgcttatattgcaataaggtgtgttgagcataacgtttaagttgctcccctgcatcagtcagtgtgacttggcggttatcacgcaaaaaaagtggatgccctagttgttcttcaagacgctggatctgacgtgaaagcgtggatggactgacatgcatggcttgcgcagtcttggtgaaatggcaactttcagcaagatgtaagaagagtttgagatcgcgaatatccatggtcagccgcctaggtaaatagtaaaaacaacgttgcatttattgcaacatcatcttgtaaatatatcaatttaagcaatggctttcatcccctatagtaaagtcatgcaatacctcaccgagagtggggataacaatagcaaacatatacacaacgatttgggagtcgctcatggccaattattttaatacattgaatctgcgtcagcagttgtcgcaactgggtaaatgtcgctttatgtctcgtgacgaatttgccgatgaggctaattatctaaaaggtaaaaaagtcgttattgttggctgtggtgcacaaggtttaaaccaaggtttaaatatgcgtgattcaggactggatatcgcctacgcattacgccaagaggctattgatgaaaagcgtgcttcatggcgtcgtgccactgaaaatggttttgaagtaggaacctatgaagcattgatcccgcaagccgatttagtggttaacttaacgccggataaacagcactccgccgttgttcaagccgttcaaccactgatgaagtcaggcgccgctttggggtattctcatgggtttaatatcgttgaagtgggtgaaaaaattcgtgacgatattaccgttgtgatggttgcgccaaaatgtccaggtactgaggtgcgcgaagagtataagcgtggttttggtgtacctaccctaattgctgttcacccagaaaatgatgctaaaggtgaaggtatggccattgcgaaagcatgggcggcagccacaggtggacatcgtgcgggagtgttggaatcatcttttgttgcggaagtaaaatcagacctgatgggcgaacaaactatcctgtgtggtatgttacaagccggctctctgctgtgttatgacaaaatggttgctgaaggtgttgaaccgggctatgcaggtaagcttatccagtttggttgggaaacgattacagaagccctgaagcaaggtggtattaccttgatgatggatagattatctaatcctgccaaaatgcgtgcttatgctttatcagagcaattaaaagagattatggcaccactgtttgctaaacatatggatgatattatttcaggtaaattctctgaaaccatgatggcagattgggcaaatgatgataaaaacttgctgacatggcgtgaagaaacgggtgcaagcgcatttgaaaattatccggaatatgaaggtaaaatcagcgagcaagagtattttgatcatggcgtattgatggttgcgatggttaaagcgggtgttgagctggcgtttgatacgatgattgaagctggcattatcgctgaatctgcctattatgagtcactgcatgaattgccattaatcgcgaatacgattgcgcgtaaacgtctgtatgaaatgaatgtggttatttcagataccgcggaatacggtaactatctgttctcttttgctgccgtgccgatgttaaaagagtttatgacgacgttgcaaagtggcgatttagcgaagcatgttccagatagtgggacagataatgctcaattgcgtgatatcaatgaagccattcgtcagcaccctattgagattgtcggtaagaaattaagagggtatatgacggatatgaaaaagattgctgttgccaactaatttttcgtcgctctttacgcgataagtgcgttggctgcactcggttacccaagtcacatactaatgtatgctccttgggataacctcctttgccgccttcttctcacgcaaatagcttagaaaaataagtactaatatattttaaaagataaaacagaatataagtttatccaaagcaccgtaaaaccccgtccttcaggtcggggatataaggcgcggttttttaactaactaggtgtttcctgttgctcaatatactggcagataatggatattggtgcgccaccacaactccccgcgaaataactcggcgaccaaagaacccccttgtagtaatcacgttgggcaatatcaggacgatcacgtcgaagtaatcgactcgatacccctttaaggctgttaaccagattagatatcgccagttttggcgggtaattaatcagtaaatgaacctgatcccgctccccatccatttcaacccgttcaacatcaaaatcagcacaaacactggcaaagtagcctcgccatttttcaattgcatcctgatcaaatattttttgccggtattttgtgacaaagaccaaatggacgtgtatcaggaatacacaatgtttgccacggcgaatattagtttcatttttcatagaccaaagtataataggtaatatgaaacgtctacaagcctttaaattccagttaagacccaatggtcagcaagagcgtgagatgagacgctttgcaggggcttgtcgttttgttttcaatcgggcattagcacgtcagaatgagaattacgaagcagggaataaatacattccctatacaaaaatggcttcatggctcattgagtggaaatctgacacagagacacaatggttgaaggaagccccatcacaaccgttacaacagtcacttaaagatttggaacgggcttacaagaattttttccagaagcgtaccgcttttcctcgattcaagaaacgcggtaaaaatgacgcttttcgttacccgcagggcgtgaagctcgatcaatctaatagtcgtatatcgttgccaaagttgggatggatgcgctaccgcaacagtcgtgaagtcgtcggagaagtgagaaacgtcacggtcagtcagtcatgcggtaaatggtacgtcagcattcagactgagtatgaagcgacagaaccacaacatgaatcaacctcaatagtcgggcttgatgcaggcgtgacaaaacttgccacgctttcagacggtacggtatacccgcccgtcagcagttttaaagtaaaccagcgaaagctggcaaggcttcaacggaaattaagccgtaaaatcaaattcagtgccaactggcaaaaacaaaagcgcaaaattcaacgtctgcattctcatattgccaatatcaggaaagactcccttcacaaagtcaccagcgaaatcagcaaaaaccacgcaatgattgtcattgaggacttaaaggtcagtaacatgtctaaatcggcaaaaggtacgacagaacggcatggatggaacgtaaaagcgaaatctggtttaaaccgcgcaatactggagcagggctggtatgaaatgcgccgtcagtttgagtacaagcagctctggcgaggtggtcaggtactggcaataccccctgcctacaccagtcagaagtgcgcttgctgtggtcatacagcaaaggaaaaccgccagtcacaaagtcaattcgagtgccttgaatgtggatatacagcgaatgctgatatcaacggggcacgtaacattttagcggcaggacatgccgtgcttgcctgtggagggagggtgcagtcagaccgcccgtcgaagcaggaacccgccgaggtgattcagacatcagtctgaacgcagtagggatccacgtcctttagggcgtggaggatgtcaatatcttgaaatagatagtttagaaaaataagtgctaaatatattttaaaaagataaaaccacatatctatcaatttgatatgtggtttttatttaaataaatcagaatgtgagccagttctgtcaaaatgaacagtatcattgtctattttataaataagtagccaatcaggttcgatatgaagatctcgacgaggcttccagtttcctgttaatggatgatctttcaattgagcaggtagtcgttttccttgcactaatagtaatataatctcttttagtttattaatatcctttcctcgcttttctgcgagttttaagtcttttttaaattgtcctgaataactcacttttcgcgtttagatatccaattttttgaataaatcatgggcatcttcagcataaaaaacatcatcacctttatctgtttttgcaaaagtgtttaatgttttttcatttggttgtgtttgattactttccacataaactcgaatgagatctcttaagatttgagaggctggtctgtgtttatttcgagctattgcaacaaaagcctctttgagctctatatcaactttagtggctattaattcgctttttatactcataatatacacctccatatttgtttgaatattatacaaagtaaaactttattaaacaaggttaaacttcctttacctagagaaataaagctcaaaaaactgaaccattttcctatgcgctttctgctacaatgactccccgtgatattcttggttaatgaagtttggaaaaagtatgcgattaaatcccggtcagcaaaaagcagttgaatatgtgtcaggtccttgtctggtcttggcgggagccggctcgggtaaaacacgggtgataaccaataaaattgcttatcttattcgtcaatgccgttattctgctaagcagattgctgcggtgacttttaccaataaagcggcgcgtgaaatgaaagagcgtgttgctcaaacattgggaaaacaagaggcaaaaggattaatgatctcgaccttccatacattaggattggagattattaagcgagaatacaaagcattaggcataaaatccaacttttctttgtttgatgatcaagaccaatccgcattattaaaagaattaacggtagatttattagaagaagataaagatttgctatcacagttaaagagtcaaatctctaactggaaaaatgacatgctcacacctgagcaagtgattggtagagcacaatcgcagcaagatcatacttttgccgagtgctttcgacgttatgagcaacatttactaagctgtaatgtattggattttgatgacttaatcagtaagcctaccttgctattacgtactaatgaagaagtaagggcgcgctggcaacagcgtattcgttatctgctggtggatgaatatcaagataccaatacaagccaatatgagttggtgaaatggttagtgggtgaaagagcccgtttcactgtggtgggggatgatgatcagtctatttattcatggcgtggtgcgcgtccccaaaatctggtgttattgcaaaaagatttcccacagctaaatgtgatcaaactggaacaaaattatcggtcatcagggcgtattttaaaatcagctaatattttaattgaaaataatccccatgtatttgaaaaacggctgttttcagaattaggttatggggatgagctacgagtattaaccgctaataatgaagagcatgaagctgagcgtgtagcgggggaactgattgcccatcattttattaataaaactaattataaagattacgcaatactctatcgaggtaatcaccagtcgcgtatttttgaaaagtatttgatgcaaaatcgcattccttatcgcatttcgggtgaaacctcgtttttttcccgtgaagagatcaaggatattttggcttacttaagagtgatcactaatccggatgatgatgctgcattcttacgtatcgtcaataagcctcgtcgtgaaataggcccgatgactatccaaaagttgggggagtgggctaaagtccgtgataaaagcttatttaatgcctgttttgacttgggattaagccaaacgttaacagggcgaggtttaagtgcattacaggctttttcacagtggatggcgcgaattgtacaacaatcagagcgtgagcctttgctcgctgtacgtgatttgcttcatgaaatggattatgaaagttggttatatgaaacctctagtagcgcgaaagcggctgaaatgagaatgaaaaatattaaccagcttttttcttggatgagtgaaatgcttgagggggatgagctacatgaacccatgacgctctctcaagtggtcaaccgttttactctgcgcgatatgatggagcgtggtgaaaccgatgaagagttagatcaagtgcaattaatgacacttcacgcctcaaaaggactggaatttccacatgtttttctggttggcatggaagaggggatcttgcctcatcaaagtagtatcgatgaagataacgttgaagaagagcggcgtttagcttatgtcggtattactcgagcacaaaagacattaactttcacattatgtaaagagcgacgtcaatacggtgaattaattcgtccagagcccagtcgttttctatatgaattgcctcaagacgatctccattgggataccaataaaaagaaagtgttaagtgctcaagaaaagcaagaaaaagggcaaaaaggggtcgctgggcttaaagcgatgctggcgagacataaaccttagctgtctgtcagtaaaaaataaaatcccttacttgcatgataagtaagggattattttgaatctggttagacgttttaacctatgcgtgagttattttgctcttcaagcattaatggccaatgaacgtagctttgtaactgtatctcttcatgaagattttccgcacgtaaaggatgttcagcgatccattgatgtggcaaggtaatgattaatttttcatcttccgtacgtaaacgcagtgcaggtaaagtatcatcacgacgacgactggcaaaaataattgctaggcgaagtaaacgtaccaagcggtatgcttgatttatcggtagcgcattttgctgattcaaaggtgcgagatcgataatccccttctgatttcttaaaaatgaggcgattaaacgtcgttgcgcgggtgtataaccaggtaaatcaaggtgggaaactaaataactggcatgtgaaggcgcttggcgaaaatcaacacttaagccgatttcatgtaaggcacaagcgctggaaagtagctctcgacagcgattatctaattgccaacttttactgacttgaatgaaaaaatgctctgctaattgttgaacacgatgggcttgctcaatatcaatttggaaacggcgctgaatattacgcaaagtacgttgacgaatatcttgctcaataggtaaatgcaacataccgtagactaagccttcacgtagtgcaccaccggctaagatcatattttcaatatgcagggtttcaaaaatagcgatcagaatggctaatccgctagggaaaacaagcgctctttcgaaagtaaggccttcgatttctaactcttcaagcttgccacactcaatggctttttgtttcagtcgctctaatttaggtaaggtaattaattcatccattccttgagcaatcatgatctcttgtaatgcttgaacggtgcccgatgcccctacacaaacctgccaaccttgttggataagtttttctgccacaggtgcaaggatagcttttgctgcctgttgtgcttgagcaaagttttcttctgttaatgagcgatcgctaaaatagcgctctagccatgttacacaacccatgctcaaactcattagctgtgtcgttttagcccccgtaccggtgactaattctgtgctaccgccaccaatatctaccaccaagcgctgttctgcaccacccgttgtatgggcaacaccacgatagataaggcgtgcttcttcctcaccactgataacatgaaccgtattgcctaatatttcagacgctttagcgacgaaaatatctgcatttttagcaatacgtaaggtcgcagttgcaacgactcggatttgttctgcgggaatatctctgagatattcagaaaacagtcgcaagcattgccaaccacgctccatagcctgctctgacagctcgttttctttatttaggccagcagcaagtctgactttacgtttaacgcgagataatacttggatagatcccgcgatttcacgaacgactaacatatgaaagctgttagagcctaaatcgatagcagcataaagtgatgaggatttcagcataatttatgagtgactcgggcgtttattacggttattacgttgagtattatttcctctacgaggtgccgaattattacgacgaggctgaccttgacgaggacgatgacgacgttttggctcaggtaaatcagttaataatgcatcactgttatatttactaacaggaatagcatgttgaatataggtctcaatcgccggtaaattcaacgcgtattcttcacaggctaagctaattgagttaccacttttacccgcacgtccagttctacctatacggtgtacataatcttcacagtcatcaggtaaatcatagttaaagacatgtgttacagaaggtatatgaagaccacgagctgcaacatcggttgccacaagaatatcaatattaccttgggtaaaatcttctaggatacgcagacgttttttctgtggcacgtcacctgttaatagacctacgcggtgtccatctgcggcaagatgcgcccaaatatcatcacaacgatgtttggtgttagcaaaaataatacagcgctctggccactcttcttcaattaaggtttgcagaagacgcattttttcttcattagaaggatagaacagctcttcttttatgctaaacccagttttttgttcaggttcaacttctacatattcagggttattcatctgctcgaaagctaactctctgacacgatatgagagtgtggcggaaaagagcatattcatacgctctgcggcatttggcatgcgacggaataaccagcgaatatctttaataaagcccagatcgtacattctgtctgcttcatcaagtacgacaacttgaatagcgttaagattaatgtgaccttgttttacatagtcaattaaacgacccgtggtaccgataacgatatctacaccgttatttaatactttaagttgttcgtcatagccatctccaccataggctagacccattttaacaccagtgctttgtgctaaaggttgtgcatctgtataaatttgcacagctaattcgcgcgttggcgccataatcagtgcacgaggttgattcttttcatgcccttcttttgcagggtgagttaaaagataatgaaacgtcgaggttaaaaacgccaacgtttttcctgttcctgtttgggcttgcccagcaatgtcatgacctttcacagtgataggtaacgtcaatgcctgaatttgtgtacaattagagaacccttttttctcaagggcttctatcacttttggatgcaaggcgaagtcggaaaacttcttttctgtcaaatatgttttgctcataatgtaatagaatatcagttataggttgcattacaaaaggatatccgctgaaatgctgatagtcttttgttatttaatgttacactggtacggtcaatattattctttggagtagaacaatgagcgataaaatccttcacttatctgacaacacattcgatgttgatgtattacaagcaaccggccccgtgctcgttgatttctgggctgaatggtgcggcccatgtaaaatgattgctcctattctagatgaagttgcaacagaatacgcgggtaaattaacagttgcgaagctaaatatcgatgaaaaccctgcgacagcaccaaaatacggtattcgtggtatccctacactgattttattcaaaaatggtgcagttgctgcgactaaagttggtgcattgtcaaaaactcaattaaaagagttcttagacgaaaacatctaatttgatttaaagcaccaaaataacgaaggacgtttagatcttgttggtatttctgttactgaccgctagacgtccgcttcgaagcatgataagttagcgccacttacttacataatatagcggattttattggtcatatgatatgacatggttaataagtctgagatattaaatatcaggttcagattgttagagctttgatataaactatttgaatattgtatttgaataaactataagtaatctgaattcatctaaccagtccggttgtcttagaataatctatagtattcaaggaatataatttttctatatatgttcctaacccataactgaaagtacaatcatcttgttacggcaatggatgtcactttctggggacagtgttgtgactggtctatatagcattaacatgctttctaacattatcacgatgtttatactgatgttataaagtagtaatctgtaattttacacatgacgaaactgacagcgattcgctgttatactattcacgttcatagttcgagagttaccccgagttattaagaacccaccattatgaatcttaccgaattaaaaaatacgccggtatcagaactgatagcacttggcgaaaatatggggctagagaacctagctcgaatgagaaaacaagacatcattttctctatcttgaagcaacatgccaaaagtggagaagatattttcggtgatggagtgctggaaatactacaggatggctttggcttcctacgttcctcagacagttcctaccttgctggcccagatgatatctatgtttctccaagtcaaatccgtcgttttaaccttcgcactggtgataccatagcagggaaaattcgcccacctaaagaaggtgaacgctattttgccctccttaaagtgaatgaagttaactttgacaaaccagaaaacgcccgcagtaaaatcctctttgaaaacttaacaccattacatgctaataaccgcttacgtatggaacgtggtaatggttctaccgaagatttaactgcccgtgtactcgacttggctgcacctattggtcgtggacaacgtggtttaatcgttgccccaccaaaagcgggtaaaacaatgttgctacaaaatattgcggccaacattgctcataactatcctgattgcgtattaatggtacttcttattgatgaacgtcctgaagaagtcacagagatgcaacgtttagttaaaggtgaagttattgcctctacctttgatgagccagcatctcgtcatgtgcaagtagcggaaatggttattgagaaagccaagcgtttagtagaacataaaaaagacgttatcattttattagactctattactcgtttagcccgtgcttataacaccgtagtaccttcttcaggaaaagtattaaccggtggtgtggatgcgaacgcgctacatcgtccaaaacgtttcttcggggctgctcgtaatgtagaagaaggtggtagtttaaccattattgcgactgcattggttgatactggctctaagatggatgaagttatctacgaagagtttaaaggtacaggtaatatggaattacacctgtcgcgtaagattgcagaaaaacgagtattcccagcaattgattacaaccgttcaggaacacgtaaagaagaattactgacatcgcaagatgagttacaaaaaatgtggatcctgcgtaaaattatccatccaatgggtgagattgatgcaatggaattcctcattaataaattagcgatgacaaaaacaaatgaagaattcttcgactttatgaaacgctcataaagtgttattacaaaattgagagagacaacaaaaaaagaaaaaattgtgttgatgatagaaaaataagtgatatcacaccaatttagaggttgttaaactcatttactttgtgtaattaacgatatgataaaaacgccacaagtcagtggcgttttttttacattggacttaggtcttttattatcatcgcaaaatgataatttggtatgtatattgcatatttatagttttaataaaaatagcgataacatcaataaaaatagttaaggaaaatttattattgataaagggtggtgggttactgagtaaactcgtcgtggtacaagctggagaaagaataaaaaacacatggatgggtaaataaccagctatatttattatagagaacagtactgtggatatactaaaaatgagcacaaatgttttttacgtgttcctattttctttcgctttcctatttgtagctcgtaaggtggcaaagaagattggactcgtagataaacctaactatcgtaaacgacatcatgggttgatcccccttgtaggtgggatttcagtctattttggtattgttttcgctttttatgtttcagatatctacattcctcacaaagagctgtatttgatttgtgcggggatacttgtttttatcggtgcgcttgatgatcgttatgatatcagtgtcaaaatcagggcaactatccaagcgttagtgggtattgctatgatggtattcggtggtttaaaacttgaatcacttggtcatgcttttgggccttgggatatgcatttagggccttttggttatatcgtcacgctatttgctgtttgggctgcaatcaatgcctttaatatggtggatggtattgatggtttattaggcggtctttcttgcgtttcgtttggtgcgctgggtattttactttaccaaagtggaagctctgcacttgcgttttggtgcttctcatttattgccgcgattttaccttatatcatgttaaaccttggtgtttgtggtaaaaaatttaaagtctttatgggcgatgcgggaagtacgctaataggctttactattatttggctattaatttcctctactcaagttgatcctcatccaatcaatgcggttactgcattatggatcattgctattcctcttatggatatggtggcaattatgtaccgccgtttacgtaaaggaatgagtcctttttcaccagaccgtcaacatatccaccatttaattatgcgagcaggttttacccctcgccaagcttttgttttgatcacgcttgcagccgcggtgttggccgctattggtattattggtgaaaacttatcttttgtaccagaatgggtaatgttggcattgtttttgcttgcttttgttatgtacggttattgcattaaacgcgcgtggcgagtcgctcgttttattaaacgatataaacgtcgcctacgtaaagcgacacaacttaagcattaaataagcagaggtcttttaacgtgatgaactcggaaaataacgtctcccgacaggggttttcacccgataatgaactcgatattcgaggtctttgttgtgcactatggtcaggaaaacgctggataatagggttcgcgctgctttttgcgctgattgcattaggggcatcttacttgatgcaacctaaatggagcgctattgcgatgacagagagacctactgtgaataatttaggtagttattattctcagtctcagttcttacgtaatcttgatacgcaaattaatccgtctgtaactgtttctcagttaagtatccctgatgaagcttatcaagagtttgtaacacagatttcagcttttgatacacgacgtgagttttggctgcaaacggattattacaaacaacgtaaagaaaatgatgcgcaagcagacgcggcattattagatgagctcatcaataatattcaatttacaccggctgatgagaagaaattggttaatgatcaattgaaactcattgctgaaacggccaacgattcgagtcaactgctcaatgaatatatcgcttttgcgaataaacgtgcggcagagcatctaaatgaagaagtgattgccgcatgggcaactcgaacacaatcgatgaaagccttagtgaaacgccaagaaatggccgctcaagctgcttatcaacgacaaattaatttactcaaacaatcgattaaagttgctgagaaacaaggtatttctcaaaaacagacctcgattgcgatagatgaattaccggattcgaagctgtttctactcggcgtgcctttattgcaatcacagttagaaacattaatggcaacaggaccagattttgatagtgattatgatcaaaatacggcaatgttatccaccctcgcggtaggtgctaaattacaagataacttccaaacttaccgtttcttacgtacacctgaagatcctgtgaaacgagatagtcctcgccgtgcctttatgatggtgctttggggtgctattggtgttttagtgggcgcgggtgtggcattagtcagacgtagttcattaaaaaaataatcattattacctttttatcattttaataataacgagacatcaggtgtattttcacctgatgcccctgagaataagggcatattgctttcccaaaaataagcaatataacaaagaaaaaagagagccactgtgaaagtgttgactgtttttggcacacgccctgaagcgatcaaaatggcacctttagtgcacgctttagcaaatgatgattcgtttgaggcgaaagtttgtgttacggcccaacatcgagaaatgcttgatcaggtattaaatcttttcgagatcaaaccagattatgatctcaatattatgaaaccaggacaagatttaacagatataacctgtcgcattttagaaggtttaaaacctgttctagcgtcatttcaacctgatgttgtgttagtacatggtgatacaaccaccactatggcggcaagccttgctgctttttatcaacaaatccccgtcggtcatgttgaagcgggattacgtaccggtaatctctattctccttggccagaagaagcgaatcggacaattgccggccatttggcgatgtaccattttgctcccactgaaactgcaaagttaaatctggtgcgagaagcggttgcggataaaaatatttttgttaccggcaataccgttattgatgcgctattttgggttagcgagcgagtgatgggaaatcaaaccctgctcgatgaacttgctgtgcaatatccctttattcagccagaaagaaagatgatcttagttacgggacatcgcagagaaagctttgggggtggttttgagcgcatttgccaagcattagcagagattgcattggctcaccccgatgttgaagttgtctatcctgttcacttgaatcctaatgtaagtgaacccgtaaagcgtattctgcatggaattaataatattaaattaattcaaccgcaagattacctgccttttgtttatttaatgaaccacgcttaccttattttaactgattcaggtggtattcaagaagaggcgccttcattaggtaaacctgttcttgttatgcgcgatacaacagagcgccctgaagcagttgaagcgggttctgtgcgtttagtgggtacagatactaaacgtattgttagcgaagtaacctctttattgacagacgaaaacgcatatcaccaaatgagtaaagcaacaaatccttatggtgatggtcatgcctgccaacgtattcttgaagcattgaaaaataatcaggtgacattatgagttttgaaactatttctgttatcggcctcggctacattggattaccaacagcggcagcttttgcctctcgtaaaaaaagtgttattggtgtggatgttaaccaacacgctgttgataccattaataaaggtcaaattcacatcgttgaacctgatctggataaagtggtaaaacaagccgttgaagaagggcatttaaaagcctataccacaccacaacccgcagacgcttaccttattgcagttccaaccccctttaaaggcgaacatgaacccgatctggcttatgttgaagccgctgcgcgttcaatagcacctgtacttaagaaaggtgatttgattattttagaatcaacctcacccgttggaacaacagaacaaatgtcacagtggcttgcgcaggctcgtgaggatttaactttcccacatcaacaaggtgaaaatgccgatattgatatcgcttattgccctgagcgtgtattgccaggacaagtgatggttgaacttatccgcaatgaccgtgttgtggggggcatgaaccgtaaatcatcagagcgtgccagcgagttatacaaaattttccttgaaggtgaatgtgttatcactaatgcccgtactgcagagatgtgtaagctaacagaaaatagcttccgtgacgtgaatattgcatttgctaatgagttatccctgatttgtgctgaccaagatattaatgtgtgggagctaattagtttggctaatcgtcatcctcgcgtgaatattttacagccgggtcctggtgtcggtggacactgtattgccgttgatccttggtttatcgtgtctcaaaatcctaaacaatcacgcttaattcatactgcccgtttggtcaatgatggcaaacctgtatgggttatcgaccaagttaaagccgctgtggcggattgtttaactgaaaccggtaaacgtgctaacgagatcaaaattgcctgctttggtttagcctttaaacctaatattgacgatttacgtgaaagtccagcaatgaatatcacccaacaagttgctaactggcatagtgggaaaacatttgctgtggagccaaatattcatgaattaccgactaaattaaaaggtatcactgaattagtctctacagagcaggcattaaaagaggcggatattgttttaatgttagtcgaccatcaacagtttaaagcgatacctggtagccaagttacccaaaaatggattgtcgatacaaaaggagtatggcgttgagacgtattttagtcacaggcggcgccggttttatcggctccgcggttgttagacatattattgataacaccaatgacagtgtcgtcgtggtagataaactgacttatgcgggaaatttagagtcacttgcccctgtggcgaacagtgaacgttacgcgtttgaacaggttgatatttgcgatcgcgctgcacttgatagtctatttgcgcaatatcaaccagatatcgtgatgcatttagccgcggaaagccatgttgaccgctctattgatgggcctgcagcgtttattgaaactaatattgttggtacttacaccttattagaagctgcacgtcatttctggtcagtattacctgaagataaaaaagcggcatttcgtttccaccatatttcaactgatgaagtgtatggcgatttagaaggaacggatgatttctttactgaaacgacaccttatgcaccaagtagcccttattcagcttctaaagcatccagtgaccaccttgtacgagcatggttgcgtacctatggcttgccaacattgatcaccaattgttcaaataactatggcccttatcattttcctgagaaattaatcccgctgattattttgaatgcaatttcaggaaaaccactgcctgtttatggcaaaggtgaacaaattcgcgattggctctatgttgaagatcatgcccgtgcattgtatttagtggcaacaacggctcaaccgggtaaaacatataatattggtggtcataatgaacgccgtaatattgatgtagtgacaactatttgtgaattgctcgaagagttgcatcctaataaacctgctggtgtggcgaaatatgttgatttaattacccatgtaaaagacagaccgggtcacgatctacgctatgctattgatgccgctaaaattgcagcagagttaggttggaaaccacaagagacctttgagtcaggtattcgtaagactgtattgtggtatttaaataaccaaacttggtggcaacgagtactagatggctcttatgcaggagagcgtttaggactgggtgattgattacgtgaaggataaatgatgaaaggtattattttagcgggtggctctggtacacgcttacatccgataacgaaaggggtatcgaaacagctgttacctatctatgataaacccatgatctattatccgctctcagtacttatgttagcgggaattcgtgatattttgattatcaccactcctgatgatctcacttcatttcaacgtttattgggtgatggctctgcatttggtgtccatctgcaatataaagttcagccatctcctgatggcttagctcaagcctttattttaggggatgagtttattggtgatgagcactgttgtttagtcttaggcgataatatctattttggtcaagggtttagccccaaactaaaacaagttgctcaacgtcagcggggcgcaacagtatttggttatcaagtgatggatccggagcgcttcggtgttgttgaatttgatgatgatttcaaagtgctgtcaatagaagaaaaacctcaacagcctaaatcgaattgggcggtcactgggctttatttctatgataaccgcgtggttgattttgcgaaaaaggtgaaaccttctgttcgtggtgagcttgagataacctcgattaatcagatgtaccttgagtgtggtgagcttaatgtggagctattgggacgcggttttgcttggttagatacggggactcacgatagtttaattgaagccagtacttttgtacaaaccgttgaaaaacgtcaaggttttaaagtggcgtgtctggaagagatcgcttggcgtaatggttggttaactgacgaacaagtcagagaaagcgcaaaatcactcgccaaaacaggttatggccgctatctattggatttattacatgtccgtcctcgccaatattaattatcttgagtgggagagcgattttttctccctcaatacaggccgtcttgagtttagtgctcaagcgcctgttttaacacaagataggcttgagcaatttacggttgttcatgccaaagttgcttcctatgatcttctactgattgataacttaacgcaattaggatttcaattcgctgaaggtgaaatagatttcaaattgccaattggcacagaaaatgcttgtgaaaatattgctgaaatacattttcgcactgccaatgaaactgatatcccattattaatgacaacggcttctgcggcttttgtacaaagtcgctttcgagcgccatggtatcaagaaggtgatagcagccgtttttatgcattatgggtaaaaaaagcggttttaggcactttcgatgatagctgtttattgacgatggatcgcgaaaataaggttacagggtttgtaacattacgtcggatttctgagagtgaagcaagagtgggattacttgctgtaatgcccaatagaacaggacaaggcattggtaagcaactgatgtcggtggcgaagtattggtgtcaacagcaaggtctatcaaccctctatgttgcaacacaaattagcaatattgcagcttcgcgtttatatacacaaagcggtgctttaattgatagcactacttattggttatacaggggataatatgattccgtttaataaaccacccgttgttggcacagaattagagtatatgaaacaggcgatggaaagtggcaagctctgtggtgatggcaacttcacaaaaaaatgtgaaaagtggttagaagaacaatttcattgtcataagacgctgttaacaccttcttgtacagcatcgttagaaatggcggctatccttctggatatcaaacccggcgatgaagtgattatgccgagtttcacttttgtttcgacttcgaacgcctttgttttacgtggtgcaactattgtgtttgtcgatattcgtccagacaccatgaaccttgatgaaacaaaaattgaagcggcgattacggagaaaacgcgtgcgatagtgcccgttcattacgcaggtgttgcctgtgaaatggataccattatggcgatcgccaaaaagcataacctgtttgtcgttgaagatgctgcgcaaggggtaatgtcgacttataaaggtaaagccttaggaactatcggtcatattggttgctatagctttcatgagacgaaaaactattcatcaggtggtgaaggtggggcaacactgattaacgatccggctttaattaatcgtgcggaagtgatccgtgaaaaaggcaccaatcgtagtcaatttttccgtgggcaagttgataaatacacttggcgtgatattggctctagctatttgctgtctgatttgcaagccgcttatctttgggcgcaactcgaacaagccgataaaattaatgaacgtcgtttagcattctggcaaatctattacgatgcattaacgccgttagccgaacaaggtttgttaacattgcctgttgtaccagacggtttagagcataatgcccatatgttctatattaaacttaatgatatagagcagcgtacggcttttaatgagtatatgaaagcacagggcgtcttaacggtattccactatgtatcactgcatacgagtcctgccggaatgaagtttggtcgttttgatggtaaagatattttcactacacaagagagtgaacgcttggtgcgcttaccgatgttctacaacatgactgaagaagagcagcaaaccgttattcatcatattcgtcatttctttgcttgatatgtcgttagctaaagcttcaatttggacagctgggtcaaccttgataaaaatcggggctggcctgttggtcgtaaagttattggcggtctcctttggtccctccggagtgggacttgcgggtaacttccgccaattaattaccgttcttggtgtactgtcaggggcgggtatttttaatggtgtaacaaaattgattgcgcaatatcaagatgatgcaatacaacgcaaaaatgtgttgggtacatcatcatcaatgatattgctgttttctacactacttgccattttatttcttatttttaccacaccaattagtcgcgttttatttggtgatgactatctgcaatatctagatattgtcagaatggttgcctttattcagatgggtattgcctatgccaactattttctggcgatattaaaaggttatcgagatgcatctggaaacgctttagcgattattgcgggaagtttaattggtgttattgcctattatctctgttatctcattgccggttatcatggtgcattaattggcttagctttagtacctgcactgattttattgccagcgatggttatcttaataaaacgtaagcgttttgctctcagtgaattaaaaccaagttgggataaggctatcgctagtcatcttggtaaatttaccattatggcgctactgacttctatcactttacccgtcgcttatatcatgatgcgtaacttgttagcagaacattatagctgggatgatgttggcatttggcaaggggttagcagtatatcggatgcttatctacaatttattacagcatcattttctgtttacttattacccacactttcacgattaacgcaaaaaagtgagatagccaaagagataaccaagtcactgaaattcgtcttgccagcggtggcagtggctagttttatggtttggttattgcgagattttgccatttggttgctattttctgaaaaatttatcgctatgcgagagttatttgcttggcaactggttggtgatgtgttgaaagtaggggcttatgtttttggctatctggtgattgcaaaggctgctttgcgtttttatattctgacagaagtgagccaatttgccttattaacgcttttttcacgctggcttattcctgaacatggtgctttaggtgcagctcaagcctatatggcaacctatattatttacttccttctctgtagttctgttttcgtgatttattgcaggcgcaaatgacaactttgatttacgtactaggttcagacattgtgcatcataacaacacaatgttacgcttttttaacgaccacctcgtgactgaggcggcattaacgtataaacctcgttttatcgttgccagtaaagataactcgttatcatcactttatcctcatttagagattgagtgtttagcggataaaaaacaagtcgcgcagagagtggtagcattagctaaagcagatagaaaacaacgttttctatttctggggcaatttaatgcgcctatttggcttgctttattgatgggcaaaattaaacgtcatcaattctggtggcatatttggggtgctgatctttatcaggatgctaagcaattaaaatttagactgttttatctattgcgtaaacttgcgcaaaaacgggttggacgtgtgtttggtacacggggtgatctaaattattttgctcaatcaaatgttaatatccccgcgaatttgctctatttcccaacaagaatggatccggcgttgacgcttacagaaaagaaggccgttgatcctcagcatattactattgtattaggtaactcaggcgataaatctaaccgccatatcgatgctttaaatgcgattgctgaacaatttggtcataaagcaaaagtgatcattcctatgggatatcccgctaataacgaggattatattcagcaagtatctgatgcagcgacaaacttatttccaacagaacacgttgagatattacgacataatcttgcctttgatgattatctcgcactcttaaaaacctgtgatttaggttattttattttccaacgtcagcagggtattggtacgttatgcctgttgatccaatttgggatcccttttgtgattagccgtcaaaatccattttggcaagacttaacagagcaaagtgttcccgttttcttctctggtgataaacttgatgtggcgttaattgaagaagcgcaacgtcaattattgctactggataggaagaatattaccttctttgcacctaattttatccaaggttggaagcaattgattgagatgagcacaggagacacccaatgacattggcgcaattggggggattaacccttgtctactttatctcgttggggtttattttattactgacctaccaagagtttcgtcgggtacgctttaattttaatgtcttcttttccatgctttatttgctgacattctattttggctttccattaacttgtttattagtctttcagtttgatgtggcagttgttcctgtcgatgccttattacacgctctattagccgctactagcttttatgcgatttattatgtcacttataaggtaagattaagaaaagcctctagcgagccttctaggccgttatttacgatgaatcgggtagagaccaacctaacttggatactgttagcgttaattgctatcgtcactgtgggcatatttttcttacaaaatggcttcttactctttaagttgaaaacatatagccaaattttttcaagccaagtatcaggtgtggcgctaaaacgctttttctatttttttattcctgcaatgctggtggtctatttcttaaagcccacacaacaacgttggctttttttcctttgtgcgacggtcggctttggcattttgacctatgttatcgtcgggggaacacgcgcaaatatcattattgcgtttgcactatttttatttattggcatcgtacgtggttggataaccttatggatgttaattgctgcaggtgtgatgagcattgtcggtatgttttggttagcactaaaacgttacgggcttgatgtcagtggtgccgaagctttttatacctttttatatctgactcgcgataccttctctccttgggaaaatcttgcattattgttgaataattacgacaaaatcgagtttcaaggactcgcacctattattcgcgatttttatgtgtttatcccttcatgggtttggccacaaagaccagatgtcgtactaaattcagcaaactattttacttgggaagtgcttaattatcatgcaggacttgccatttcaccaacgttaattggctccttggtggtgatggggggcgttgtatttatccccttaggcgcggtggttgttgggcttattattaagtggtttgattggctctatcagcagggtttaaatgaacacaatcgctacaaatctgccattcttcaagcattttgctttggtgctatttttaacatgattgttttagcgcgtgagggcgttgattcgtttgtgtctcgcgtggtctttttctgtttagtatttggtgcctgtttaattgcagccaaactcctgtattggttatttgaaagtgcaggattagttcgtcactatgttattaatcaagtgcgcaataaacctcgtttagaacaaaaggaaaagtaatggatacaaattcaattccgaagtattccatccgtgggcacaatatctggggatttaaagatatggcgcattttttggattatctttatcaaggtgcgcaaattaaaagtggctctttaattgcgattaatgcagaaaaaatcttaaccgcagaaacagataaaggcctaaatcagttattagatgaagcggattatttgtacgccgatggcattagtgttgttcgcggcattcgacgtaaatatcctgatgcacaagtgtctcgtattgcgggagccgatttatgggaagctttaatggagcgtgccgggaaagaaggcacaccggtctttttggttggtggcaaacctcaggtattggcgcagacggaaagtaaattaaaggcacaatggaatgtgaatattgtcggtagccaagatggttactttacgccacaagatagagatgcactttttgaacgtatcaaagcttctggggcaaagattgtgaccattgccatgggctcacctaagcaagagctatttattcgtgcttgtcggcaagtacacccagacgcgttatatatgggcgtaggtggcacttacgatgtttttacaggacatgttaagcgtgcgccaaaagcgtggcaaaatttaggcctagagtggttatatcgtttactgtcacaacctagccggatcaagcgccaatttaagttattaaaatttgttggttattactattccaataaattgtaagttgcgtgagtattttttgtcggcaataagtgttaaatagcaaaaatcgcaatctttactggtatcttgattgtttgattattatactaatggggcgttgagtgggtaaaaacgctccatttatcgacgaaatgcacaaactatcgtcaaacaaactttttttttcaaaaagcactagacagacagtgcgtaaatccgtactatcctctcccgcaacggcgtgaagcgcccgtagctcagctggatagagcgctgccctccggaggcagaggtctcaggttcgaatcctgtcgggcgcgccattaaagcgtgctaagagttacggtgaagagcgttgttgtagaagtagtaagatagctgttatggtggctatagctcagttggtagagccctggattgtgattccagttgtcgtgggttcgagtcccattagccaccccatcttatcttagtttttgtttatgcgagggtggcggaattggtagacgcgctagcttcaggtgttagtgtcctaacggacgtgggggttcaagtcccccccttcgcaccataaacaagataagagcagtcattcagacggcgagtagcgcagcctggtagcgcaactggtttgggaccagtgggtcggaggttcgaatcctctctcgccgaccaataagaaaaagcctcgatatatatcgaggcttttttgcatttattatcaagctattgacagcaatattgtcttatttcatttatattgttgtatcttccttttgtcctttctcttttgtccttttgctactgtcctaagcacaatagaccgtttatctatgattcatgattaaagcaggttgttggctcttttagtttaaaaagggagatcattaggctatttgtttacagggcagtgtaagtatattagttaaagattattaataatttgtattaccgcctgattttatactacataaaaagagcatcatgagaaagttaaataatttatgtaaccgtatgaatttaaatgaaatattttttattgtcggtaaaaaacaacacatggcaaatttgatgtcgctaaaaggtgacatataactcaatgatttttatatattatatactggtgttcgcttaactgtcgtgaaacagagacgagttggcaaatttattttttcttttttatttaacaatagcctgataaaaatacgctctctgatcttttatattttaaatacgccatacaggcgaaggcgcctaaaaaattcaattagttagttttatgctgtttgggaattaattttttattggcggaaaatacaagttggcacgctaaatgcattacttattctgtagatgctcattccactccttatgacagcatatgacttcataaacctaggaatgatgcagagccgattatcggtgcctacgtccacgttatcgatgaaacaccattcatcaccaacaggacgaaacgttgagtgaggcaccatccgtctgtagacctgattgtatattttatgcacctgtattttttaatacgggtgtttttttgtctgttttttatctcatcccttttgaattgataacactatcacgctattatccagcgcaagggtaaatagggggtagcatcacgatgataaataaccaaaaagcgtatcttgcgcaagaaaggctctttttgatagataagtttggcccattattgttttttttgatcccgctgatcatgctgattatcggtggaaaatcatgggcgaagtatgtcgcttttctgtgtcaggggatcgcactgatttatatcgtggtgttttaccaagcaagaaaatattatttgtcatttcaacatgaaaataacaaagggataccttatcgtttttatcgtatcgcttgggtctatttatttttaattttgtgtcttgaagtagtactactggttcaacacgctttttaaaagtaataaaaaaccctcaattttgtgtttgagggttttggtcaataaatgaaatgatgtatttattgcagtgctttatttgttttaggctcgtcaaaaataacagagtctttttttaacgtcattaatagcgcatctttgcgtactttggctgactcaactgatttattctgtttatctagcacatcagccaaccacgcaaaatcatgaacatctggacgctgttttaatgcattgcgaaatgctgtttctgcttgtgcccattgcccttgttgcatggcaatttgaccgacggtgctattgagtaatggtgtcggaccatgttgtttaattagtgagttaagcacttttaatattgagtctggatcgctgttttttaagcgcggtaacaataagatcaggcgttcatcatagtgacgtttgatcccatctaaaatgatcgtctgcgcagtttgcggatcgttgcactcaataaggtgttctgctaatacaaatcgtagtccattatcatgttggatcttacgaggctgtgccttccaccaatttttcagtccatcacaaccattttcggacatcttctgtcccatcagcccaatataggcttgttgacgtaattgctctaattcatcatctgtatgtagggctattttctgcattgaagggatgatatcaagtagtgcttgccaagcttctgtacgtatatacgcagtttctgctaagcgtaatacttccggatgacgaggcacttgattgagtaattcatcaaccccagtacgagcagcatggttttcattttgtgccagtaaaatgcgcactcgggtaatatcaacgggtaactgattggtatcagcaagctcagaagctcgctccagatgttgctgtactctaaactcatcaccccgttgttgtgctgcttctgctgctagtaaatagtttactacaggttgttccgcataatcggcattgcggctcatcagcttttctacttgtttgaaatcaccttccgcaagtttcattaatgctaaccgtgtttgtttacgtgctcggctgcgtttgcgcaaagagaaccaactataggctttagagcctgtaccaataaaacgacgataacaccagccaagcaagagcaatatcagttgcagtaggacaaacatgatcacaagactggtaacgctagtttcaatatcccaattatcggtttgtataaagacataaccttgatgacccgctaatacagggccgaagattatccctgcaatcaataccacaaacaggagtaagatcttgaacataaatttattctccttgtggtgctacggttgttgatgtcgttgttcctgatgttgcactatcttgtgctgcatcaaccgcataaggggcttgtgtagcttcggcatctttggcttcaaccgcttctggctgtgatgtctcgttttgggtcagcaaattacggatctgcttttctactcgtttttctaacagagagaggctttttaattctgttggcattgcaagagtaataggctgcttttcaagctcattaatactgtctaagaaagccgttgtattcggatcggtggtatcaaaataggcgcgtacccaagtagataccgcttctaatgattgttgataaatctctgtttgatggcgaggcaccgcttgagatgcaattaataaacgagagcggatattttctcgcagataaatatcttggtttggagctaatagtggaatagcggtactgtctcgacgacggatagtaataaagtcatccataaagcttttccagcttttactgaggttttgcttccagtcagaaagcgagcctgaaatggcttcatcatttttatccatcggtgagccatcacgctcaaatccagataagcgtaggttatcaacctgattagctaactgatttaattgtaaaatagtaccatcattatcaattttgctcagcgcggctaagttgccaatatcttcattaatggcgcggcgaatggccaataagcttgggtcattcatttctgctaagctactatcagcgccttttaataaacttaccgctgtgacgacatcttggtcattccataatttgcggcccgccatttttaccataaaatcagcttgtgctaatagccagctctttacatctgcacttgagatagccgcaaattgcgtttgtaaattttggatttgacgctcagtaacttggcgttcattttgcagtttatcaatagtgagtttttgtgagttaaactgactgtcaatattgtcaaaacgttgttgataagtatcttgcaattgttgtaattgtgccaattgtgattttagcgattggttttctgtacttagtttagtcgcttgttgagtggtgtaataataaagaccaccaccgattgccagaataacgaggatcgcaacggcactccctatcaaacctgaacgcttattgtttacaggttttacttcttgatagcggatatcgtcatcagcctttgatgtaccattctgcaagtcattttcattcgtatttttctgttccgtcatatcggcgtctcatttaagttctatattaatgcatgaaataaagcatcattattggcactttcagcaacggttatttttttaaagcctaatgtgctagctattgttgctaatcgtttactgaccaccactaaatgactgtttaacagccatgctttttcagatccagcgactagataaaagagttgttgcaacatttcgccactggtgaccacaaaggtatccacttgggcatttttccactttagcgcaaactcttcagatacataatcaataaatagacgctgataacattcacattcatcaacaattgcaccgcgttgacgtaatgttgtggcaagtagttcgcgaccaccattgcctcttagtagtagtactcgcttgttttctatttgttgaagtgaagacaaggccagtaggtcttcactggtttctccaaattctggataacgtatagaatgtcctgttaattgctgaaactcttcagcggtgctttgacctattccataatagaatagcgtatctggccatgattgttgtaattgatttagttgccagtttgcgtaccacaccgcatttttagaaagtaaaaaaaggtaatcacccgtacttagcttatttaatttgttttctaatatggaaagctctttacccgcggctatttctattaaaggtgcatgaaaagcatgctttcccgcatcaattaagcgttgcgtaagttgttctcctgctgggctaggacgagtgattaaaatactcatatcgctgtattaccttgatatacagcggttaaaatctctctagctcctttatctagtagctcttcggcaagagaaataccagcttgctctgcatcttcaggtgatactaagcgttcgccacgtaaaatagtttcaccatcaggggagccaactaatgctcgtagccaaattttgccgttttgccaaatagcataactaccaataggtacttggcaacccccctcaaggcgagtgttcatcgcgcgttctgcttttacacaagttgcagtatctgcgtggttaagggcggctaataaggcttgagtatcatgatcatctaagcgacactcaatgccaacggcaccttgtcctaccgcaggaagagattgttccgcagacaaagaagaacgaatacgctcagttaatttaagacgttttaagcccgcgacagcaagaataatagcatcatagtcgccattatcgagtttacttaaacgggttcctacattaccgcgtaaatcacgaataattaaatcggggcgcagtgcttttaattggcattggcgacgtaggcttgaggtaccaacgacacttccggctggcagttgttctaatgaatcataatgattagagacaaaggcatcacggggatcttctcgctcacaaatcgtcaccaatcccagaccttcaggaaaatcaatggggacatctttcattgaatgtacggcaatatctgcacgagagctgagtagtgctagttctagctctttgacaaataaccctttaccacccactttcgctaatggggtatctaagatgatgtcgcctttcgtgaccatcggtactaattcaacgactaagctcggatgagcgatttgtagttgttctttaacataaagcgcttgccacatagcaagagggctttggcgtgtagcaatacggatggtactttttgacataatattattatctcttccgagcgagttagcataatttctgtttataaataaggctttgttttaacactttaaggttcatttttccagttaaggcgtggtgtggtaaggaaacaatgaaacataaagaggttttaaatcaatattagtgaggtaaaaaataaaaaaagggaattacaaatagtaaaaatcgttatttttatctttttactgttttatatctatataaaaagtgtggttatttacaacatttaaacattaaattaatttatttaacaatagtgagaggagagaaaggagagacttacagaattttctgaacacattgataaaacaaccattattttaaggtgacccttttctatctattttttctataatataaaaccacccaaaaaattaacaaaaatattaattaataaaaaagaaataaaataattaaataaataatgaaaatttaaattttatttaaatagacaatgatgaagtttgaatatgtctttaattaattttattgtttatattgttattatttactcatttttatagataactcatagaaaaaagcaatgctatatatagttattatatatcaacgagttatgtttatttttatttttttactcttttttaggtaaaggtaagtatttttttcaacttgttatcacaaggtaactcgtcgattttagctgttttatggccgaacaacacttttttctatatgttttctctataagtaaaatagactatctctatgatataaaagtcattatttgctctgctttatacgattaagcgactaaaaaagcaatttagatcttggtgctatattttgagatcctctttacgccttgcttgcaaggtgttaaattgatcacgtttccgagattttgttagtaaagttttatctattaataattgaataattaaagctcggtaatttataaactcagattctactattttcttagtattgttcaggcgaaactcttgtatctttatattgaaacactgaagcaacggctggatgcgattaatcaactcaggctggaacgtgcatttgcatcgatgagtgatgtgtttaaacaggtgtatggtttaattcctgttttactgcattaccaccaccctcagttgccaggctatattcaaggaaatgtccctcatggtacatgtttctttgaacctgatgacgtgcaacgtcaatgggtcaataagctgactaatgcatcatgtgatgagccaatgaatggatacaccagcggagagttacctattacgggtatctattcgatgggaagtacttcctcgattgggcaaagtcactgctccgatattgatatttgggtctgtcaccaatcttggctggaccaagatgagcgtgcgcgtttacaacgtaaatgtttactgatagaacaatgggcgggagaattaggtattgatgttacttttttcttaattgatgagaatcgcttccgtcatcatgcaagtggtagcttaggtggggaagattgcggctcaactcagcatatcctgttacttgatgagttctaccgtaccgctgttcgccttgcaggtaaacgtttgttatggacgatggtaccagtagaagaagagtaccattacgatgaatatgttaattcactctatgcccaaggtgtattaacgcccaatgaatggcttgatttaggtggattaggtgagctttctgccgaagagtattttggtgcaagcctgtggcaactctataagagtgttgattcaccttataaagccgtattaaaaagtattttattggaagcctattccgcggattaccctaatggcaaattgttggcattagaaatgaaacagcatcttcatcgtggtgaaatcgtaaattacggtttagatgcatattgtatgatgcttgagcgcgtaacccgctatttagtttcgattaatgatttaacccgccttgatttaatccgtcgctgtttctacctgaaagtttgtgaaaaattatctaatgaaaaaaatgagaatgaacctgcaggttggcgacgccaagtattatctcagttagtcacgcagtggcagtgggatcacgaacgtttagcgatattagataatcgtgatagctggaaaatagagcgcgttcgtaacgcacataatgaattattagatacgatgatgcaaagctatcgtaatcttattcgttttgcgcgccgtaataacttaagtgtcagtgctagtccacaagatattggtgtattaacacgtaagctttatgccgcttttgaagcgctaccgggtaaagtaaccctggttaatccacagatttctcctgatttatccgagcctcatttaacctttatctatgtgccaccgggacgcgctaatcgtagtggttggtatctttataatcgggctcccgattttgcacatattgttggtcatcaaccgttagaatataaccgttacttaaataaattagtggcgtggtcttattttaatgggttacttactaaagattcacaggtttatattcatcaaggtgactcctcttgtgatgaaattaaacttcatgaattagtgcgggatatctcgagtcattttcctattcgtttacctgccccgacgcctaaagcactgtatagcccttgtgaaattaggcatttagccattattgtcaatttagaagttgacccaacagagcgtttttctgatcaagtagtgcattttgattttagaaagttggatgtatttagctttggcgaggaagagcaatgcttaattggtagtatcgatttactctatcgtaactcttggaatgaagtgagaacgctgcattttaatggtacgcaatcgatgttggaatcgttaaaaactattttaggtaaaatgcaccaagatgcggccccacctgcatcggttgaagttttttgttatagccagcatctacgtggtttaattcgtacccgtgttcaacagttagtctcagaatgtattgaattgcgtttatcaaccaatagattagagccagggcgttttaaagcattacgtattgcagggcaaacatggggattgttctttgaacgtcttaatgtttctgtacaaaagttggagaatgccattgaattttatggtgctatttcatacaacaaattgcatggattacccgttaaattaggcaaagatgcccgttatctgcccgctgtgattgatggttttgcttgtgaagggattattcagttcttctttgaaacaacagaggataataatgtctttaatatctatatcttagatgaagctaatcgagtggagatttattctcactgcgaaggtagtaaagaagagctagtaaaagatgtcagccgtttttactcttcatctcatgatcgctttacttatggctcaagctttatcaacttcaatttgccacagttttatcaaatcgtgaaagtggatggagcaacgcaagtactgccttttgctgggggatcgtttggtaagctaagtgatctaggtaaaacagcgccaaaagaagagatgagtactaagcctattcaaggatttaatgattatcaggctgtacatcatcattgataatcgacacggcaaaaccgatagagaagtgatggggactttccagcacccatcacttagttgtttgtgttaaaaagaaaatgcttcaccactttgttcgctgattgcttgagccaacatggttaaaaattccccgccactacgatcgcaaacccactgtgtacctttccaatcaaaatgataaccgccagaacgcgttgctaaccatacttgatgaaaggcttcctgacgattaatgataattttactatgattttcaaaggttaatgtcattacgccaccattgatttcacaatcaatatccgcatcaccttcataattatcaatggtttgttctatttctgacatcaattcgtcagctaattggtgaaattcactatcgttcatcttcattttcctatttgcttttcgagatctaactgcgattatagaggatattaaccaaattaatgataggcagatttcgaatgaaaacgtatttacgttgcacccttgctataataacactgatttctctttctggttgtggcttgaaaggccctctctatttcccgcctgaagatactcaggcaaatatgactcagtcatcccagccaacccagcaagttgagacttcctcaacacaaaacaattagtcaatattagaaacgggacacccgtttcaggcagggttaagatgcaattttcaaaaatgcatgggttaggcaatgactttatggttgttgatgctgttacccaaaatgtttatttttcaccagaattaatttgccggttagccaatcgacatactggtgttgggtttgatcaactgttagtagttgaagcaccttatgatcctgaattggactttcattaccgcatttttaatgctgatgggagtgaagtcgcacaatgtggcaatggtgctcgctgttttgctcgatttgtgagaataaaagggcttacaaataaaagagaaataaaagtcagtacccagtctggcagaatgaccttacatgttatggataatgaagatgtttgtgtcaatatgggagagccagagtttgaaccacaaaaagtaccgtttcgtgctcaaaaagtagaaaaaacctatattatcagagcgatggaacgaacagttctatgtggtgtggtgtcaatgggaaatccgcactgcgtgatccaagtggaagatatcaaaactgcggaagttgagtcattgggctcagtattggaacaacacgaacgctttccagagcgcgccaatattggttttatgcaggtagttgatagaaatacattgcatttacgggtatttgaacgtggtgctggagaaactcaagcttgtggaagcggtgcctgtgccgctgtcgcggtggggatttcccaaggtttattagatagaaaagtgaaagttaatttaccgggtggatcattatcaattgaatggaaaggtacaggaaacccactttatatgacaggacctgctgtgcatatttatgatggaacaatccagctataatattatttttgagaggtgcttggtatgacggataagaatgagcagttttgttaccctgagaaaaacgaactcaacgatcaaaccatcattgattatctcaaggagcatcctggtttctttatccgtaatgccagctatattgagcaaatgcaagttcctcacccagtaagagggagtatctcattagttgagtggataatgtcacgtcagcgaacacgtattcattatcttgaagaggatatgcgtttgttgattgagcaagctgcagaaaatgaatctctatttagccaattactaaggcttatttctgagttatcccgctgtaattcattaaaggaaatgctggaacagttaaatctttgggcgaaggagttagggctttactcagtacaactgcgtcttttcaccgatcgttggcaattacaacctcctttagatgctcaaacactcgcactatctcgtcaaacatttgagcatttccgtattcagcgtatgggcgataataatcactatttggggccattaaatggccaagaaatgatgttattaatgcctaatgttcgtcgttctggctctgtggcactctcattattagggcattatggcgatttaggggtgatcatttttaatagtcgagatagccaacattttcaagaaggtatgggaacggcaatgttggataaactcgcacagatattacctgagttattaactcgctggatcgcaagacaatgagccaaattattgacgtccctgaaacactctcattagccattgatagcttcttaagttatatcgaagttgaacggcgattaagtccggtaacggtagaaaattaccagcgacaattaatgaccattgcacaaatgatggttgcaataaaaatcaaccaatggtcgttactagaaagccaacatgtgcgtatgttattggctaaaagccatcgcagtggattacaacctgcaagtttagcattgcgcttttcagcattgcgtagcttccttgattggcaagtttctcaaggaatgttagcagtaaaccccgccaaaggggttcgaacacccaaatcaggtcgtcacttgcctaaaaatatggatgttgatgaagtcagtcagttgatgaatatcgacttaaaagatcccctctctgtaagggatagaacgatgctggaagtgatgtatggcgctggattacgtttatctgaactgactaacttaaatatcaatgatattgatctccaagaaggcgaagtccgagtattaggtaaaggcagtaaagagcgtaaagttcccttgggaagaaaagctgtagagtggttacagcattggtttgccatgcgggagctgtattctcctgaggatactgcggtttttatctcaacgaaaagcggtaaacgattatctgttcgcagtgtgcaaaaacgttttgaactttggggggtgaaacaaggactcagtagccatgtcaatcctcataaactgcgccactcttttgccactcatttacttgaatcaagtggtgatttgcgagcagtacaagagctattaggccacgctaatttatcaaccacacaagtttatactcacttagattttcagcatttagcgaaagtctatgatgctgctcatccaagagctaagagagaaaaatcataatgcacttttatcgcactctgatgccgattgcagcgatgacttttgatttagacgatacgctgtatgacaatgttcctgtgatggataaaacagaagaagagaccttagcgtttatccgtcagtatgatgagcgttttcaccattttactgaacatgatgtagatgcttacaaacagccactattagaaaataatcctgatatttttcacgatatcactcagtggcgttggttagcggctaaaaatatgttgttagactatggctatagtgaaactaaagcacagcaaggtgctgatgaaattatggctcattttgcttattggcgtagccgtattaatgtccctaataatacccatcacgtgttgacacaactggcggaaaaaatcccattaatcgctattactaatggtaatgctaatccattaagctgtgggttggggcaatactttacacatattttaaaggcagggcctgatgggcgctctaagccttatcctgatatgtttgataaggcggcttcgttacttaaactccctcatcagaatattttgcatgtaggcgatcatctagtgacggatgtagaaggcgcggttaaaagtggattacaggcgtgttggattaatttagataatcgcagtttgtttaccgaaggtgaaacgcgtgttatgcctcatattgagatcactgaattagctaaactggttgaattaatttaatcatagacgcgctctgtgcaggtctttatccacttttcagtgggcatagttttgcatcgggcgtaaaatcctgttagtttgttgcttaataaactaacttctgtatatatccacagtatttctcttcactcaatgattggtaattatggacgtctcatatctgctcgaaggccttaacgataaacagcgcgaagccgttgcagcaccgcgtgtaaatatgctggtacttgcaggtgctggtagtggtaaaacacgtgtattagtacatcgcattgcttggttattatctgttgaacaagcctctcctttttccattatggcggtaacatttactaataaagctgcagcagaaatgcgtcatcgtattgaggacttgattggtactagtcaagggggaatgtggataggtaccttccatagtctcgcccatcgtttattacgggcgcattatcttgatgctggtttacctcaagacttccaaatcattgatagtgatgatcaataccgtttaattcgtcgtatcgtaaaatccatggctcttgatgataagcaatggcctcctcgtcaaggtatgtggtatatcaatggaaagaaagatgagggactccgcccacaacatattcagacctatggtaaccccgtggaaaccacatggttaaaagtctatcaagcttatcaagaagcttgtgatcgtgcaggcttagtggactttgcagagttgttattgcgtgcccatgagttgtggctgaataaaccacaaattttagaacactatcaacaccgttttaccaatatcttagtggatgaattccaagatactaaccgtattcaatatgcttggatcaggatgttggcaggacagactggtaaggtgatgatagtcggtgatgatgatcaatctatttacggttggcgtggggctcaagttgaaaatattcaaaactttttaaatgaatttcccggcgctgaaaccatccgcttagagcaaaattatcgctccaccagtaatattctaaaagccgctaatgccttaattgctaataatagcgatcgtttaggtaaaaacctatggacagaaggggctgaaggcgagccgatttcactctattgtgcatttaacgacctagatgaagcgcgttatgtagtagggcgtattaagcgttggcatgaagagggaggcgcccttgcagattgtgccattctttatcgtagtaatgcccaatcgcgcatcatggaagaagcgctattacaagcgaataagccttatcgtatttatggtggacagcgtttcttcgagcgtcaagagatcaaagatgccctctcttatatgcgtttaacagcgaatcgtcacgatgatgcctcttttgaacgtgttgtgaatacgccaacgcgtggaattggtgatagaaccttagatgtggttcgccaagtagctagagataaccaaatcacattatgggaaagtgcattacaggttattgagcataaaatgctagcaggccgggctattgcggcaattgcgcgctttttagaattaattgagacgttagcaaatgaaacagcggatatgccgttgcatgtgcaaacagaccgtattattcgcgattctggcttaaaagcgatgtatgagcaggaaaagggtgaaaaagcacaagcgcggattgaaaacttggaagagctggtgacggcgactcgtcaatttagctatcaagatgaagacgaagatttaatgccattgcaagcttttctctctcatgcggcattagaatcaggagaaggacaggctgatgcgtatcaagatgctgttcaattgatgacactacactcggcgaaagggctagagttctcacaagtgtttattgtcggggttgaagaaggcatgttcccaagccagatgtccttggatgaaggtgggcgcttagaagaagagcgtcggctagcttatgttggcgtgacgcgtgccatgaaaaagttaacacttacttacgctgaaaaccgccgtttatatggtaaagaagtgagccatcgaccttcgcgctttattggcgagttaccaaaagagtgtgttgaagaagtacggttacgggcgacggtttcacgtcccgtgaatcatcatcgtttaggtacaccgattgttagtaatgatacaggttactcccttggtcaacgggttaaacaccctaaatttggtgaaggtactattattaatatcgaaggtagcggtgaacactgccgattacaaatagcctttaatggtgaaggtattaagtggttggttgctgcttttgcacgattagagtgattggctatttattgacactgttaattttttaaaagagagcaatataaaaaaacacccttactaatctagaagatagttaagggtgttttttttaatgaacatataattaaccgaattaataattccgttacagattattttaacggagttagctgatgaaaattacttctgtattatttgatacttattatccaattaagcctgtgacaaaaatcgctgaggatttctctgttgataaaatgccccctgtggagcctatttatgagcagcgttttgatacttaccatcctagtgctcctgccaacccgtttgaagaagatctctattgtcgattattacgacatcaacgtgattttgtgccgcgcatgaatctctatttaagtggggtgatcggtgctatccgtattgcaactaattctacatcaacattctttagacgctcacaacgccgtatagaagcgatagcaatgggttgtaatacaaaagaagagcactcaagccctgccagaaaggggtatctttctggcgctttcattagtattgataatttagctcaatagtaagtatgtgctaacttcgtcttaaacgttgctgagtgtagagtgcatctaaagtaaataagataagggcgacccaaataaacccaaaggtcactaaacgctccgcatcgatttgttctccatacaccatagtggcgagaataaacatcaatgtgggtcctatatactggaaaaatcctagggtagatagacgcaaatgttgagctgcttcggtaaagagcagtaagggtacggtggtgataacccctgcagcaatcagtaatgtatttagcgaccagctattttctaacatattgctggtgggtgaatgggtaaaaaagaggatataaactaaagcaacaggaaacagccacagtgtttctattgtcatacccgtttgtgcatctaccccaagttttttacgtaatagtccatataggccgaatgtgactgctaaactaaggccgataacaggtacagagccgaattgccataattggataaagacgccagtaaaggctaaacttacggcgaaccattgcatacggcgaaagcgctcgcctaaaaaaatcataccgaataacacattaactaatggattaataaagtaaccaaggctggcttctaacataaatccgtggttaaccgcccatatatagataagccagttactggcaataatcaccgcagtaagtgctaacattagtacttttttgggctgacgaacaagttggcgtaaatagggccaatggcgagtgatcgacattaaaagcaacataaagaagaatgaccataaaatacggtgtgttaagatctcttctgcgggcacttcttgaatgcttttaaaatagacaggggcaataccccagatcaaataggcgcctagggcacataaaacgccttttaaagtgtttttctggctcatgctatctctggtattgatggaaatgaaatatgtgacggggttatcatacccaatgacattatctaatgtgtcattaggcatgtttttttacaagtaattaatattaatctacccaagataatggataagtcgcatcagccaacaatataagttgctgtgccgctggcgatatgaacttgtttttcattgtgtaattcaacccttgccacagaaactttattaccactacgtagtatatgactacttgcggtaaaacattcccctcgccctgggcgtaaataatcaacacgtagatcgatagtgcccattttggccagtttttgttcgagttgctcttgggatataggggctagacgtgttagggcattacctacacagactaaacctgcacttacgtctaacaccgaggctatcatgccaccatgtaaaatgcgttgtgcgatattgccaaccagtttgtcttggtagcgaaattggatctcagcataatcttgttcgaagcgaattaattctaaacctatcagttgattaaaaggcatttgatagacaaaaacatgtccaatcaacacttgtgcttcttccagtgttaatattttctccattttaaagttcctcgacattttattattaggttaatgctttgttaataatagatgacaaaaaggtaatttcccattcatcagattaatagagcgtcgagaaaatatatgagatttaatggaaataacgtgtaaaatatggacgcctaacgcgaataaagctgatttataagcgctcacgacaaatattaagtgctatcttttatattgttcactaataatacaggataattaactatgcgttacatccgttctttactcacggtgattttaacctaccctgtatggggagtggcggcggagatatcacctgtatcatctccaacaccgttggttcagggcagtattatttccggtctattacaagagtatgattcaccctttgtactttacccttatgaatctaattatattatttacacaaaaacctccgatatgaataaagaggcgattgccagttatgattggggtcataaggctaaaaaagatgaagttaaatttcagataagtcttgcattcccgctgtggcgtggcattgccggggaaaattctgtattagcggcttcctatacgcaacgctcttggtggcagctaagtaataaaaaagagtctgcgccgtttcgcgaaaccaactatgaaccacaactatttttaggttgggcgacggattatcaatttgccggttggacattaagagaaattgaaacgggatttaaccatgaatcgaatggccgcgcagagcctacttcacgaagttggaatcgtgtttatgcacgttttatggcgcaaaaaggtaatttccaactcgatctgaaaccttggtaccgttttaatgaaagtgctaaaaatgatgataatcccgatattaatcgctatatgggatattaccgcttaaaagcgggttatcgtttaggcgaaagtacgtttactttaacagggcgttataactggagtagcggatacggtgctgctgagctaggctggagctatcctattaccaagcatgtacgcttttatacccaactatttagtgggtatggggagtcgatgattgattataatttccgtcaaactcgtatcggtgtcggcgttatgctcaatgatatgctgtaattttcttcattctagggtagcataacacgacaagtggtgatggcacctttatactggtgccttttcttttactcctcattatctttcttaccagcttttcagaggaatggcgtgtccacagcagaagttcttaattcaatgccatcagctcaggttattttgcgcgaaacctttggttatcagcaatttcgaccaggccagcaagagattattgataccattatcaccgggcgcgattgtttagtcgtcatgccgacgggagggggaaaatcactttgctatcaaattcctgctcttttgcttgatggcttaaccgtagttgtttctccgttgatttctctaatgaaagatcaagttgatcaactctgcttacatggtattgacgcggcatttcttaattcaactcaaagccgagatgaacaactgcaagtacaaatgcgttgtcaacggggtgaaataaaactgttatatattgcacctgaacgcctaatgatggagagttttcttcaccatttagtgcaatggcagcctgctttattagcggtggatgaagcacactgtatttctcaatggggtcatgattttcgccctgaataccgaggaattggcttattaagacagtatcttcctgatgtccctattattgcgttaacggcgacggctgataatacaacacgtcatgacattattaatcagctcgcgttacgcactcctttagttcatattagcagttttgaccgcccaaatattcgttatactttagttgaaaaatataaaccgctcgatcaactttggctgtttattcgtgggcagaaaggaaaatcaggcattatctattgtaatagtcgcagcaaagtagaagagaccgctgaacgactaggcaagcgaggattaagtatcgcggcttatcatgcgggtatggatattgccacacgagcgaaagtgcaagatgcttttcaacgcgatgatttgcagattgtggtcgcaacggtcgctttcggtatgggaattaataaacccaatgtacgttttgtggttcattttgatattccgcgtaatattgaatcttactatcaagaaacgggacgcgcaggacgcgatggtttacctgcacaagcggtactgttttatgatcccgcggatatggcttggctacgtcgttgtttagatgagaagccagaaagtgaacaaaaagcgattgaatcccataaattaaatgccatgggggcttttgccgaagcacaaacttgtcgacgtttagtgttacttaattactttggtgaacaccgccaacaagcttgtggtaactgcgatatttgccttgatccacctaaacaatatgatgggttagtggatgcacaaaaagcgttatcttgcatctatcgtaccggacaacgttttggtattggttatattgttgaaattttacgcggtgccaataatcaacgcattcgcgataatggtcatgacaaattgccagtttatggtattggtaaagcccatagccatgaatattggatgagtgtgatccgccaattgatccatttaggtatggttgcgcaaaatatcgttcatcgttctgcattacaattgactgagatagctcgaccgatattgcgtggtgaggtgtcattacccttggcagtaccacgactattaagcccaacaaaaagccgttatcagcaaacaaaaaatagtcatcgacagtacgataggaaattatttgcgaaactacgcaaattacgtaaatctattgctgatgaagaaaatattccaccctttgtggtatttaatgatgtcacactgattgaaatggcggaacaatgccctgtctgccctgatgaattgttgttgatcaatggggtaggacaacgaaaactagaacgatttgggccagcatttatgacacttatccgtgatcatattgaggggttcgaatagcgccaacgaggaggagccgaatgacaaccacactttttcagcacatgtggttatctcgtgaaaagcaattctctgcttttacgaatggtatcttattggacttttggaaccaacgacaggaaggcgaatttaccggagtcgatggcgtgagcattcgctatgctcattggcgctcttcatcacacaaaaaagcgttggtgatctgctctggtcgtagtgaaagttatgtaaaatatcctgaagtggccttcgatttttatcatcttggttatgatatttttcttctcgatcatcgggggcaaggattatcagggcgcttattagatgatccgcaaaaaggccacgtagaaaaattcagtgattatgtcgatgatttatcgacatttattgatactatcgttttgccttatcactatcagcactattttgcgttagcccattcgatgggcggcgctattttagccagctacctattacgtaaacctgatattttccaagccgccgcactgtgtgcgccgatgtttgggattaatttaccaataccacgctgggtggctaattttttagttaaccgtgcagaacaaagtgtttcagaacgaaataattacgcggtatcaacgggcaaatggtttcctttgccatttatcttgaatgtattgactcatagccatgaaaggtatcgtcgatacttacgttactatgccgatttccctcaattacgtttaggtgggccgacctatcattggatgaaagagagcctagaaacgggggattggctgattgaacatgcaaaagagattaacacccctttgctagtacttgaagctgagctagataaagtggtggataatcggggagtaagggctttctgtgatggttatagtcagtccagaacaagagaagaaaagcaaaaattgccacttgtgattgaaggtgcgcaccatgaaatcttgttcgaaatagataagctacgctcacaagcattaattgaaatctgtgagttttatgataagcatttattttaatcaggaatgtgtatgtattcgatagttgcttctgatcttgatggcaccttgttatcacctaaccacttattaactccctataccaaagaaacgttacatctgcttattgaaaaagggatccattttgtgtttgccacaggacgtcatcatatcgatgtggcacaaattcgtgatgggcttggtattgacgcgtatatgatcacttcaaatggggctcgagtacacaatacgcaaggcactcttattttcagtcaagatcttgaacctgaaatcgtttatgacttagccctaatggtgtttgatcacccagatattgcaacgaatatttatagcagtgatgactggtatatcaataaagaaacgcctgaattaaaagaattttttaaagaatcggtatttaattaccgtctatttgagaaaacaggcttcccaacaacgcaggtgtgcaaagtcttttttacctcagaagatcatgaattgttagttgagttagaaaagaaaattaatcaacgttggggcaataaaattaacgcaagtttttcgttgcgtaattgcctagaaattatggcgggtggggtatcaaaaggagaggcactacaaaaagtcgctaagttgatgcaacattcagtaaaagatgccattgcatttggtgatggtatgaatgataaagagatgctacagatggcgggtaaaggctgcattatgcaaaatgcccaccagctactaaaagatctattaccggatatggaagtgattggctcaaatgttgatgatgctgttgcacactatttacgtaagttgtatcaggtttaatcacaaccaatgggataaattaaaaggcggataatacttccgccttttagtttaagagcgcaatttacttaatgatattgcagggtaaattgcagtgttccatcagctttgcctgcggtggtagtctcagaagtttgtatataacccgcttctaaaggaatagaaaaattaccactgttattcttttcgctcaccgttatcaattttcctaactcaatgggttggttttggtatttcacctgaatgccatagcctttggctgtattgctatcattagcattattaaggctaatcgtgccggcggtttggctagcatcaggggtgccatcgaattttatcttaatgggggaaacgggatcacaatctaaatcgatattcacatcttgtagactatcagggctaacagagccaacaccattaaagctcgattttgccacagagcctaaaggaacattaatattattattgataacttcacagccactggaaacaatattaaggggattaaggtaaacctttggttcagtacggccagtattgtcactggtgataaatcccccattgtgatacaaaatcagcatagcaacccatgtgcttggaatggtttgtgatttgatattgttacgcagtttatataacgtcatttttaaagaagcggtataactactacggtttaagttacttgtgcaaataaggcgattactgtagttgccatcaacattatatagtccatcgacataagcagaaccggtgcaaccgacagtaatagtcccgtgtagggtataaccgataccactagtccctaattcacgcacataggcactgcctactttagggctggaagctgaaatatagccgggcaagtagatccccgcctgtactgggcctgtgatattccaccaagtccagccatacatagtgcctaagtcaatcgttgccagctctgttaaaataggcgcggttcttgaaacataaattggattgttataactcaccgttctagtggttgtatcggcacgatattcagcaaaagcggttgatgtatacaaaagtgcagacagacaacccaaagttatatatttattcatatttatcacctatctgcagtccagttgtaaaaattgaattttctcgagcgatagatcggcgtttaatgttgcttggcactgttcggtagcactattcccccatttggcttgtagttgactacttgcaggtacaccatttaggaaaacctcaccatcattagccacaatcccactggaaatcacttgtccatcttggctaatttcaacttggctaccgaatggtaaaggtttaccgttataagagaggttcactaatactcttgcacccttgcgagctttaaaatcggctaaaacaatcgcgcctttcgttgggatcactgttgttgaagtgagttccacatcgttgtttccctttaaggaagcgggatcaaccgttactctattgcgttcataacgggaaacgttagggataacggcataaccttgagcattggtatataaactttgtgcactgctaattttcaaatgatcaatatcttccgctttgattaaaatagcggagtcatagatagtgcgagatggggttattccatcttgatggattaataacgcgccagttgctccccaattcactgactggaaacgtttatcatagttataaccagcactgatttcgccgcccgaagcactataactaccattgatagcaccgctatattcttggcgagtatggttatagttttgcgaaatatcatactgaagattgttatcttcgagacgagtaccacttaaacttacagaacttatcgaatcaccttgtttactggtgttataacgataacttaaccaattgttattgctggtcatattgaacggcaggttaaagttaatcgataaaatttgatcggttaattcgctttcttgccgtttattataggcataagaaatactataactgagtgagcgataattagagttaaagcttaggttgatattgcgatcgactctatcttgataccaatagtattgctgataaccatttaaagagaggtaaccaagctctcctaatgcttgcgatactgagatctgaaactgttttttcttacgataaagctgtgaaaaacgttcattcgtggttgaaaaatcataataatctttagttgagtagcgataagacgctaatgaaaatcctgttttggtatccggtaaatattttgaatactggacacgataagattgcccttgtgctttatggttatcgataagtgtggtatttgcatgagttatatcggctgaaatcgcccctaaataacccatatttacgccggcacctatcgcataagcttgataatctgctgaaagcagcgtacctccataaagggaaaaattataaggtaagccgtaaatggcagaagcttgtaaaaaggtcggttttcgctctgcgctatcagcattatatttccccaagtcgagactatattttaagttcccagctcgttgcatcatggggactgcagagaagggttgggaaaatgtacgtttgcttccatcagcttcttcaacagttacttgtaaatcaccactataagaggtggggtagagatctgatatttcaaattcaccggggggaacagaggtttgataaataacactattattttggcgaatagtcaccattgcgttgctttgtgcaattcctcttacaacaggagcaaagccacgctgactttgtggcaacatgctttcatctgaggctaatttaataccacgataaggaacactttctaacacatcattacttgatgcggtttcacctagtgttaatcgactttttaaacggcggatatcgcgttcaacgtaagtttgtagactgttccattctgcggcgttatcactatttttgttgtaagtgctgtgattacgtacacgccaagcgcctagattaataccactgcgtaatcctaaaaagatattgtcactgtctttttggtctcgataccaatatttattctgacgataggtgtaattaataaaggctgcattaatcccatcattccattctgtgggggatatataaccttgcccatagttatataatgcaatttgtgggatcgaaaatgataatcgcgcacgtgaaaaatcatatttatatgtagcattaggaataacacgagcaatatccgttattttactactatcaggttgttggctaaacgcgtctgtaacggaccctttgactccccaattgagtaaatcctgtttactgatttcaggtgccagcacttttttatcgtcatcaaaaataaaacgaatttgacgattatcgataagtttatcgttaagataaatatcgacagaatagacaccaggaagttgtcctcctgcataggacaggtaattcagactgttaatatctgcaacgtgattttcgatacctaaattaagtgcttcaggattaaaaatatcttcagcaagaacagtataagggaataaaacagtcgtgatagcaatagctaacactccacgacgataaagattatctgccatgttgatgggtaatcgttttgtagatactgctatcatagaaaaagtcatcgccgtatactcttaatttaatactttatctacagtcgcaccgtaatcattgataaattgaacggtaactttctgcggaatatgattttcttttagcaagaccacttcttggtgaggattaacaaaatcattaaatgggtagcgtttatcacccactaagatatgtttaattgtcaggtgatacggcgtatcgttatttattactaaccctttattttgtttagataatttcaccttatcaaaatcaagtggttcaatatcatgggcacggagaaacaatttaaattgagagttaatcactaattggagttgattctctggacttttttccatcggtggaatggatttgatattgagccaataaaccacttcttggtttgatgccaaaggtgctccggtatatgaaattcgcgccgtgcctgaactatctggctcaatacgaaatagtggaggtgttgcaataaaaggtgttttttcatcaccttgataagctgaaacccaactttgaattaaatagggtttttccttatctgtattcataattggaatactgatttcacgtagattatcgtcatagacaaaacgtgttcctcccacacttattccagcagcttggctagccgttatgagggaaaatagtaaaaataatattagggaaatattctttttcataagtggccataagtttgaggagaggtgagagggtaatggtgattaccctcatatttatcatttattatttatattggatgctatatacagcagagccattggcagggcctggtgttgccgcatcagttgctttataacgagcaacgtagtctaggttaatttccgtacctgtgatctgtacatcttgtgaatcgtcatacagtttgatttgggaaacagcatctttctcaaataacgcgatacctacgttagttgcgccaccagaaacttgatctatagctaagatatctctgtcgcttgcatcacgagtaccgccaaaacgtacggctaccgtggtatcaacagggcagtcgattaatttaatggtaaaatctttcaggccagcaacttcccctttggttgctaagcttttagaagaaactttgcctaagtcgacggttaagtttttagaagagccatcaacagtacatgcttgatcggttatttctcccgtaaagttaattgtgcctgatgctaaagcagcaggtgctgagaatatagaaagagtcactcctaatgcacagagtgatttatttaatttgctcatgatcggtcctatataaaaagtaagcgaacttactttttaatctatttataagtatatatgtgtataaatttatttgcatagacagtatgccgataaaatataacattgctaattttttaagttaataaacatttacatgagtttttttgttcttacatcaaattatttaatatgtcgtaatttaattaaaatgattttttattaaaagtttttagatatttgttgaatagctaattgttgataataaactttgcaagttttcattaataaatgaatttttattcaaatataaatagaatttatattccttctcttttttatgcgttattaattgttttattgtttttttattcaattcatcttgaataaaaataagggggagacgtgcataacctaaaccatgctgaattaagctaattgctgtctctaccgagccaacttgaatgacttgggcctgattatcagtatcgggtgaatcaggagaaagagaaatacagctatgtttttgtaattcctgcaataattcctcatcttgtagtttctgtaatgggctatctggatgtgatactaaggtagttgtaatgctttctaaaacaataggttgcagtgatttaatataataaggtgacacaattaaatcatattctttttgcactaaaatttctgatttgctgagagaattcctataaatattaatatcatactgtttattctgcttaataaattgtgatattttgttcaaaaaaggatcagcgacatacattgggtcaattagtacgttaatttttaacttattgttaaatttgatattttttgcctttttttctagagataatgccttttctgtcacttctcgagaaagtgttagcaatagttctccctcagtagttaatactgcgcgtcttttttctaaagaaagtatttctatacccaaggtttgttctaacttattgatagtatagctaattgatgattgagtcctatgtaacacatcagcggcttgagcaaagccaccgtaatcaacaacagcttgtaaggtgatccattggtctaatgttgtgcgggatttttccataatggagtccttcttattattgtttattaataatgcattttaaacgaagctagcaatatatcttagcattgttaataggtaataatacgcattttttttgtgagttaaaaaaatattaacattataagttgtaatgctactttttaattagagaagaatatttatagttattttttattgttatctttgaatataacacttaaatttttatttttttatatgtaatttttataactattgtttttattttcattaatagtccacttaagttttagtatttttttaatataaattgttaattgatgatttatatttcttatttgtgttttttatttttcttttttcattttgttttttttattttgtttttattaaatataaatattaattaatttcttaattacttattttttaataaatatgtttatctattatatttaaaaataaagataaaaaagaaattggccaagttagtgttcacctcgtgtgaagagaaaacaaacctgcgtatataataaattaatacacttatcttttttagactacttgttggtgtttcatatagcaatttgaatgatttttgctacgtcacgctgatgcagcaaggaaaaggagaggataatgataggttaaaaaataaactaaaattatttgacttaagttaaacaaaaattaaatatgataaaaataagtaaaataaaatatcgaaaatagtattttaatactcatttattgagtaaatttaagtataaaaacgtatttttgtgatctttagcaataaaaaaagataggcgtgtttgcacaaatttttgaagaatacagaacaaagatggctttttatattgcaaaaattgataaacattaaaataagagaaaacagtaagcaactaagatggtcgctattatttcttaattctttacttagtaagaaggatctttggtaataaaagagatctctataagtaaatagaaaactaagtaacattttatgatgttcatattccaatattgtataattatatatcgataaaatagtttcattgtgttattaatcatcaattttattaaacaaaaaagtgaaaaaaaaagttattaatagtgataggtaaacggagtgtgcatacctattgtggtgtgacatgcgtcataccaacagaatagctgtttataactggctgtttgtattgaatgctaggcgcataacagtggtaagaagagtggtaacaagaagcaaaaatgccactattttggttttttcatttaaattagtggcatttttattcaaagtaatagatgtaattgactacaatccgcctacttctcttggtgttgcacgcattgaagtactaatggtattacccaccatatctacccgtgcttggaacggcgggaatggtaatggaatgccatgctctgcaaaggctagcagaatattttgatggatctcatgtctggctggcattctatgtcccatttctgcggcataaacacgtaactcgaagatttggatcccttgttgtaggtcaaccaagtaaacctcaggagcggggttgtctaaaatcatggtagagcgtttagaggcttctaataaaacattggtcacttgttcactattgcaatcagctggcgcagggatggtcattacgatacgtgtaatagagtctgataatgaccagttaataaattgctctgtaataaatgctttattaggcacaatgatctcttttctatcccaatcggtgagcgtggtggctcgcgtattgattttagaaatattcccagtcaagttacggatagtaacggtatcaccaatacgaattggcttttcaaacaagatcattaaccctgagataatgttggcaaaaatttcttgtaagccaaaaccaagacctacacccatagcggcaattaaccattgtagttttgaccactcaatacctaataatgagaaaccaacaatactgcctattagggtgatgctgtatttcgttaaagtggtaatggcataacctgtaccaggtgttagatctaagtgttgtaaaattgccagttcaagcagtgctggcagatttcttaccaattgtgccgtgataataatcactaatatagcgactaagatagaccccatggtaatgggctggatagtattgacgccattaacagaggaagtcacatcccatagtcggatattatcgacaaaagagaaggctgtattgagctctgaccagagtaaaatcatggacacaagtgcaatcatggtcagaatagaacgtactagaccaatagattgtgcactaatcgcatcaaggtcaatggcttgatcttccaactctaagttagcggtactctcaccactgctgccaacaatggtattctcatcttcccctttagctcgttgagctaaaatttctgcccgtttttgtttggctcgttcaaaggcaagcttacgacgttggatcagcatccatcgttgaataatatgataaataatcagcaaggcaaaccaaatcgccacagacatctctaagcgacccagtaatacgatggaggttgagagatagcctaagatagcggcgagggctgcaagaacaggggcaacaagtaagaaccaccataaaatggtatttatcacattatcaccagagccatgtttatctaagtaaagcggcacatgtgccttttttaggcttgaggtaataaaacttaaagcaatgcacaataataaaaagcaaaaacgcccaaccgttggcgcaaattctctgtcactatagtattcaaaggtgataagcgacatcattaacggcacaatgacgaaaatcgacagttgataaaagcgcatcgcttttttcacacgactctctttccatttaaattgcgcgataaataatccattagggcgagcaaaggtagcacttatcataaatagccatagcacaggggctgcggcagtcacaccataaccaatcgctcccgccatgggataacgccattcgacactttgtaaaccatatcctacggcagaccataatagcggtagtggtaaggcgattaatattgaccaaaatacggtacgcaccgttaatgagaaatgatcttgagtgactttaccaatgcgattactgactctttcaagaaacgcattgtaatgcttacgggtacgaagactaaaaccgacaatagatagggtgaccagtagatagataaaggtatcttggtttttgagcatgttaaccgcagcatgccctaattgtgagaaagtatctaatgaaagtaggcgagtaatatctttaattaataaaaccggataattgagttttattgggctgatatcggccacccagaacatatagcggtttgtggcatcttttgtctcttttaaggcatccgcaagttgtgttgtggctactttaagcttggtcagctctaagatttgggagtcataaccggataaaagagaattgagtaactcttggcgcgcttgaatgagggagtcaaaaatatattgctgcgcttctggtagctttgagccatcggcagtttcaggaggctggattttgcctaggttttctagcatctcttcatagcctaatcgctcaacacgtaactgaacgatatctctatccagctcttgagagcggggcatttcaggtaagcgagccaattgtgttcttaatgcttcacctaatgccgtagagccacttaaccattgggcttgctctcgaatggttgtgagtgtctgtcttacttgttgggtttgttgtgttgttagacgctgtttttcggttaactcactcatttcttgcgtctgtttattgaggatctgagaaagttgacggttagtctcgatttgcttagtcagaaactcggggagttcgcccccttgctcggcgagcatttctgtcttttctaaagcgagatctgccacttcttggcgcttgatatttagtaaactacgcaattgttgcagttgtacatcaagtcgttgataacgttttttaaatagctctaagcgcagtcgagtaatttcttgacgattattagcagaaagttgcgccatttccagctcattaaccatcgcttttcgtgctgtgacttcagcttgggttaatttattttgtgcttctgctagtggggtgtttgatgcccctattgccgctaaacgtgccgttgcatcacttagtaaacgacgagcttctgaaagttgctgagggagtaaattgagtgattcgctgatttcacggcttttatcttgctcttgttgttgtagccgagcttgttccatcagttggctactcacttgaatgattttttgctcaagctcaggaatagtaattttttctggaattgttggaactgagtgactctcttcgagtaatttagcccttaactcttgagtgatctgcggatattcatcaatagtcttttgataattatccgcattaacttgagctttttcaccatcatttatccaattgatggtgccttgtagcgcctgaacagtttcaatatcttgaggattagtactgccttcaagttgtttgatatcttgacgtaatttatcaacatccgcagcaaacaccgaagtattgaatgagatagtcagaaaaaagctaaaaagtagactgattatcaggcgcacaaggtttactccgaattacgaattattcattaatggtattattatcgcaggccttatgatcagtgcctgtggcattaatgatagagcctagtagttctcccattaatgttacagagccgttcatcagatctttatttaattgaacactattttcagggaagaggttaataacggtcgagcctaatttaaagcgtcccatctcttcaccttttttcagaaatatagcgccaactttatccgcttgaggataagtccaacgtttaataataccttcacgtggtggtgttaccatgccacaccagaccgtttcaatactccctacaatggtcgctccaacaagaatttgtatcatgggaccaaattgggtgtcaaaaaggcaaataatacgttcattacgagcaaataagttaggaacatttgccgcagttaaaggattaacagaaaagagatcgccggggacataaatcatctcttttaataacccatcgcaaggcatatgaacacggtggtaatcccgtggtgaaagataggttgtaataaattgcccatggcggaactggtcggccaaggtaaaattacctgctagcaacgcttcaagggtgtaagagtgccctttggcttgtaaaatttgatcgtcttggatctgaccaagctggctgacagcgccatctgcggggagagccagttggttatctccttcaacaatagggcgagcgccatcttttaatgcacgaataaaaaactcattaaatgttgcataagcctgaaattggctctctttcgcttcattcatatcaactttatatgcgcgagcaaacattttgatagcaaattgagtaacgctacctgcttttttattggcaaaccaaccagctagctgtgttagccataatttaggcaatagatactgtagtttaatttttagcttgtccaaaatggcaacctctgggatcgaacgataaaaaatcgacaaaaggggtctattgtacccacccttaatagggttgtcagtgaatctatgcttaagagtctaaattaatatttttacgcactttcacctgactcatactttctaaaatacgatgatagttttcaaatcgggttggtgcgatttcacctttatctacggcttcggtgatcaagcaacccggatcgtcattatgcttacaatcacggaatttacagcctcctaagaaaggtcgaaactcaataaaacctttggtcacttgctcaggtgttaaatgccacaaaccaaattcacgtacccccggtgaatcaataacatcgcctcctagagggaaatggtaaaggcgcgatgcggtggtggtatgttgtccaagccctgagttgtcagagacttgattgaccagaatactttcttccattggtggtaagagagtattgagaaggctcgatttacccacacctgactggccagcaaaaatagagatgcggccaattaatgcttgagttaatgcttctaatccctctttggtatagcttgagacttcaagcactcgataaccaatatctttataaatttgcatccactcacttaccatcgctcggctttctgcatctaacatatcgactttattcaatacaataaggggttcgatatttaaggtttcacaagccactaagtagcggtcgataatattaagtgaaagctcaggtaaaatggctgaaacaataataatttgatcgatattagcggcaataggtttaataccatcataataatctgggcgagtgagtacagaagtacgctcatgaacagcttctacaatgccattgacgcgcacattttcttgggtttgtaatgcagggcgccacaccactctatcgcctgtgactagggatgaaatagtacggcgaatattacaacgagtaatcgagccatctgcagcttcaatatctgcatgttgcccaaagcgactgataacgaggccttcggtcgcttcgcctaattgtgtatcgtctaattcaacgtgattttttttctctttgctttgcaaacgctttttatgattttcttgtactcggcgttgctggcctttagataatttacgttttgtcaccgatcctcacttgtgttattcggttagatgttcttttgtcgtgcttattgagtaaacgcgctatgataaaggttaaaatatcatgtctcactctaagaaacagctaggatatattatgtcaaaaagcgagaacaatcttatctggatagatctggaaatgactggccttgatcctgaacgcgatcgtattattgaaattgccactatcgtcaccgatccccaacttaatattttagctgaaggtcccgttattgccgtacatcaatcggataaattactcgcctcgatggatgaatggaatactacaacacatacggcaagtggtttagttcagcgggttaaagagagtcagtatgatgatgcggctgcacaacaagccactatcgaattccttgaaaaatgggtgccacagggtgcatcaccgatctgtggtaatagtgtggggcaagatagacgttttctatttcgctatatgcctgaattagaaaaatattttcattatcgttatctcgatgtcagtacactaaaagagttagctcgtcgctggaaacctgaaatccttgaaggatttaagaaaaaaaatactcatcaagcgttggatgatattcgagaatctattgctgaattagcctattatcgccaaacctttattaaagagtagaaattagcggattgatggctgatattgcatcattgtgacgattttatcgtcatgcaatcaaaaaaacgcatttttttactgataagggcttgcggttaagcatttttctcgtataatgcgcttcccgtaccgatgaagaatttcgtttgtacgggtgtaagaaagacgcgggaatagctcagttggtagagcacaaccttgccaaggttggggtcgcgagttcgagtctcgtttcccgctccaatctttcttcgatagttatcagtattagcgacgcgggaatagctcagttggtagagcacaaccttgccaaggttggggtcgcgagttcgagtctcgtttcccgctccaaatctttcttcgataattatcagcacaaaacttaccaaatgcgggaatagctcagttggtagagcacaaccttgccaaggttggggtcgcgagttcgagtctcgtttcccgctccaaatcttcttccaaagacttcaataaactcagtaaattcttataaatcaaagcgtttgtcgtaatagcattagctaagttgtttttagaagtcggcctgtctctctatgataagaatatacagtaagatatttttaccctaaaagtcgccgagtaagcagggcttgcatgtctcgtctgccatccgcaataataaagataaccacttgttttgctattgtgtgatagatgacacgataaggtttaaaaaagatttgctgatattcacgaatacctaaactttgtaattcctttggaatactgcctttcataggaaagttagcctgtgtattagtgaccttaagcagctcatctaatacataatctgcattatctatgctgtcgtggtcggcaatatagttattgatgtcctctaagtctgtttcggcatctttcgtcattaccactttataggacgccattacgattatttccttttactttttaaacgctgaaccacgctttttatatcttttacttcacctgcttcaacttgttgctgacctaacgccaatattttaagtaaggctaatgtttcctgtgtctcttcataaaaggtaatatcctgaataaccgcttttgcttcgccattttgagtaataatcatcggtgcaccagattcagtgagtttagtcatcacttcggcgacattagcttttaaataactaattggtttgatttgttctgagtaacgcatatctaccttaatcaataagactaaattaagtctaaaaaaagtctaatctgagtgtgaagagataaaagctaaaatgcaatatagaaaacctttagcgaaaaccgcttaatgaacagtccaactctatgaggtcacttcaacagggcggggagcagtcacgcataagcaacaatacaaagcgttattttgtttaataacacccaaataaagctattgcattctaaaagtcacaaggacataactatggacaggaaatagcaatgcttgtataaaatataaccaaaaaatctttattttctctctcactttttaaaaatgagtctacactgtggtaggtgcagatcagcgattgtagctaatacacttaaagcgagtgacccattgcagtgcagaaaaagggaaatcgataacagcaagaaagatcaagctatttttttgtgatctatctttgatctttgcttgcatttctatttagccagcactagaatgtgcgcctttcctcgtttaggggggagctaaacctcagatcaatttttgttgtttaggtttttattctgttaaatatactttgaagagtattttttatgaagaaaagtatttttatgacttttctttggaaaaaagagcccgagttccacttatcttaatattcttatcgaaataaattatccacaataagatgctcataatccttgcatctagcactaatttatttttttactgcacagagttatccacaggctgctatcattgagtcattagcatattatgctagtgagttaaatattgcttttatctatccaattgataagtaagtttatttttattttttttaatttgtgccacacttcgcttgaattttttcttcatattgatagacaaagagtttttattttattcacaggtgaaattatctcatcttatgagtatgcgtatcatgttaaaaactaagcatcacgaggtaggcccttagttattgcccttactagacgtttttgttgtgaagtctgtatttttagtgttttttcttctcttttggctttctgttgggcgatagcccagtgcaaatgttcatctaaaacctcccctaaaccaaagtgctcttgcaaggccagtacaattttgtcctgataaggggcattgcctaacgcaacactaatatttcttagccaacgtaaatagccaattcgtcggatcggtgaaccttctgtaatacgcagaaatttttcttcactccattggaatagatccagcaattctggtgtatgtaaggcacggcgcggagaaaaatcatcttcctctgtgagcgaagaaaaacgattccatgggcaaattaattggcaatcatcacaaccatagatacgattgcccatcaaagggcgaaattcttcaggaatagcgccttcaagttcaatcgttaggtaagaaatacagcgacgagcatcaatggtgtaaggctctacgatggcgcctgttgggcaagtggtcatgcaagctacacatttaccgcattgctcttcaacgggagaatcaataggcaaaggtaaattaattaataattcaccgagaaaaaaccaagagccggcctgattattgataacaagtgagtgtttaccaacccacccaagaccagctttcacggccaatggtcgttccattatcggcgctgaatcaacaaaaggacgaaaattaacaataccttgatattcaaactgttggcaatattgcgtaattttttcacctaattttttaaggcgttgtcttaatactttgtgataatctctacccaatgcataacggctaatatagccttgctctggattattaagggtacgagcaaaagcagcatctgttggcaaatagttcattctgacgctgatcactcgcaatgtacccggcaccaattcatggggtcttgctcgagtcatgccatatttagccatccatgccatttcaccatgatactgtttatctagccaagcttgtaaacgaggctcttcgagcgataaatcagtatcgcaaattcctgtttgttggaatcctagttcagttccccaacgttttatattttgagcaaggtgatgaagatcgagtgatgacatgagcaaccgaaataatagctaataggtgagtcctaagaatgcgcagtgtatcatagtgcaacgataggaaaaatcctcgtaagaaatagatttatggtatggttatttgaaattgattctgataataatttactttaagtgaatataaaaatggtctgtttgcatgtgctctaacatgctattaactaagtcgttattacctaacaatagattgtatgaatatgaaagaatgggttgttacattagaagatgaagctgcaacagtaaaactagggcattcagtcgcaatggcgacaaataaccaagggcttattatttatttatttggtgatctaggggccgggaaaaccacctttagccgcggatttttacaagctttaggtcatcaaggtcatgttaaaagtccgacatataccttggtagagccttatatgctgacaccacgcccagtctatcatttcgatctttatcgcttagcttcagcggaagagttagaatttatggggatacgtgactattttgcacaagatccactgtgtctcattgaatggccttctcaaggggaagggtttatacctaatgcggatttagagcttcatttaagctatgaaaatgaaggtcgtaaagcccattttattgccctttcacagagagggaatgctgttttatcccgtattcagtctgcataaaggaatattgattatgtcgagtctcatcactattgtgagccaatgtcagcgttatattgccacctttttgttggttgttctgtcactttttgtggtgcaaatagcacaagccgctacggtaacagaagtgaaggccgaaaatggggatgtggctacaacacttacattttcgtttagtggtgggaaaccaagctatagatattactcactgaaaaatccagataggttagtgatggattttaagcaaggtagccaaataacgggtttacctgtgacattaaatcgtcagcaattagcacagaaaattcgcacgacacaatcaaaagatagccaatatcaaagtatggtggtagagcttgccaaaccagtggtggtgacggagcgcttattaaatagcaatggtgaatataagttagtacttactatcaaacctattaatgctcgacaaaataacaatacatcaacgacggtcagtgtagtggcgttatcagcaaacaaagccacaaatacggtggctaatcaacagatggcgcctttggtgagtacgcctaagcaacctgttgcacctgtagtaccagtaaagcctcgcacaacctcgaataagcccgcgtcgagcgatcggcaaataattattgcgattgacgcagggcatggggggcaagatcccggcgctattgggcaaaaaggtaatcgtgaaaaagatgttaccttaagagtggcaaaaaaattagaagcgattttgcgtaatgatcctatgttcaaacccgttttaacccgcaatggcgactattttatttctgttgctggacgctctgaagtggcccgtaagcaaggtgccaatatgttagtgtctattcatgccgactctgcacctaatcgtagtgcgcgcggggcatctgtttgggtattgtcaaatcgtcgcgcgaatagtgaattaggtaaatggcttgaacaaagcgaaaaacaatcagagcttctcggtggcgctggtgatgcactcgcagaaggggttgatccctatttaagccaagcagtattagatttacaatttggtaattcacagcgtgtaggctatgacgttgcggtagcggtgttatctgaacttagaaaagtaggatcattacataaaaaaacaccagagcacgccagcttaggggttttacgttcacctgatattccgtctattttagtcgaaacaggttttattagtcatgccgctgaggaacaattgctgatttcagatgcttaccaagagaaattagccgcttcaatctatgccggattaaaaaattactttctcgctcatcccttacagaatgggccaaaataaagataaacgtgggataaggtaatggcgattaatttattacctcctcagttagcaaatcagattgcagcaggggaagtcgttgaaagacccgcttctgttgttaaagagttacttgaaaacagcttagatgcgggtgcgacaacaattgatatcgatatcgataaaggtggcgctaagctaattcgtatccgcgataatggatgcggcatttctcgtgatgatttgaagttagcacttgctcgccatgcaacaagcaaaatatcgacactggatgatcttgaagccattatgagcatggggtttcgtggtgaagccttagccagtatcagctctgtatcacgtttaaccttaacatctcgtaccgcatctcaggaggaggcttggcaagcctacgccgaagggcgtgatatgacagtggcagtcaagccagcagcacatccggtggggagcacagttgaagtgctcgatcttttttataacactcctgcaagacgtaaatttttacgtaccgaaaaaacagagtttggtcatatagatgaagtagtacgtcgtatagccttatcccgctttgatgtgtcaattaatttaacccacaacggtaagcgggtgcgtcaatatcgcgctgcgaaagaaactcatcagcatcatcgtcgtttaagtgctatctgtggtaatcattttgttgatcaagcaatgcaactaacgtgggagcatggtgatctggcaataaaaggctgggtagagcatcctttagctccagtgcaaggcagtgaaatacagtactgttatgtcaatgggcgcatgatgcgcgatagattgattaaccatgctattcgtcaagcatatgaaggttatttgcaaggtgagcagcaaccttcttatgtgctttatttaaccgttgaccctcatcaagtggatgtcaatgtgcatcctgccaaacatgaagtgcgttttcacgaatcgcgcttagtacacgattttatctatcaagctgtcttgagtgtgttaaggcaggttacagaagatacgttatctttagatgaagaggataatggggctttaactgccacaacatttcctgaaaatcgccaagttgcgggagaaaatgttttttcgcagccttatcaagcaccagtaacctcatctacgcaaaaaaagagcacgggagcttaccaaggaagtgcaggaaaagggttaacagatacgcaaaagagtccccaaaaaacgctagatacacgtcagtttggtgagagttatcaacgtacgcaaggcatgctttatcaaaaaatgatgcaagaaagtgcgagcgatgttgaaaataaagaaaaaatacccctatttccccctcgtcccccattgaatttggttgatgttggtcatacaacgaataacaatgaaacaaatgtaatttcagtggtgcctcgttctgttaatgccagcgcagcgcaaacagattatacttttggccgggtattggcgatttatcagcagaaatatgcgttaattgaatcttcgcaaggtctagggctgttagcattggaagaagctgattttctgttaaaatgtgcccagttattgccagaaaatgaaaatctgaaaccccaacctttgctagtgcctttaaaagtcacactcagtaaagatgaaattaatacatttaagcagtttcaggcgttaatcagtgattttgggattgttatcgacatctctcatggtaaagcgacgatccacgcggtctcgttgcctttgcgacagcaaaatttacctgaattactgacaaagctattagcttatttggcaacagaaaaattatgctctaaacaacaaattgggcattggttagcaaaacagttaagtcatgagtcgggtgtttggtcacaggctcaggcagtaggattattggctgatattgaacgattatgtccacaatatgtcagacagccgtccaaaaacttattacaattaatagaattacaacctgtggtagcggcactgaataatgagcgaagtaaaaacgcaaataaaacctaaagcaatctttctgatggggccaacagcctctggtaaaaccgcattagccattgcgctaagacaaaaactgcccgttgatcttattagtgttgattctgctcttatttatcgtggtatggatattggtactgcgaaaccggatgagacagagcagtcgcttgcaccacatcgtttaattgatattctagatcccgcattaccttattctgccgcagactttcgtaaagatgcgttaaaagcaatggaagaaattacggctgcaggacgaattccactattagtgggcgggactatgctatattttaaagcgttattagaaggcttatcgcctttacccagtgctaatccagaaattcgtgctgaaatcgaaaaaaaagcagccgaacaagggtgggaggcaattcatcaagagctagcatccgtcgatcccgttgcggctaaacggatccatcctaatgatcctcaacgcctttctcgtgcactggaagtttacctgatttcaggtaaatcgatgacagaattaactcaaatatcaggcgaagcattgccttatgatgtttatcagtttgcgattgctccgaaagatagaaatgtacttcatcaacgcattgaagcacgttttaaacagatgttaacgtgtggctttgaagatgaagtaaaatcattataccaacggggcgatctgcatgaagatttaccttctatacgttgtgtcggctatcgccagatgtggtcatatttatccggcgaaatcgactatgatgagatggtttatcgagggatctgcgctacccggcaattagcgaagcgacaaatcacttggttaagaggttggcatgatgttcattggttagatagtgaagattttgaacagtctcttaacactgttttgcaggtagttagtgcatagatggtaggtttgtgtaaaattgatagttgctaaagtgcaatttttgagtagttcattttttcgaaccattaggttctagtataaaacaacaaaataaggaaaacatagaatggctaaggggcaatctttgcaagatccttttctgaacgcattacgtcgtgaaagggtccctgtttcaatctatttggtaaacggcattaaattacagggtcagatcgaatcttttgaccaatttgttattctgctgaaaaacactgttagtcagatggtatacaaacatgctatctctaccgtagtaccttctcgtcctgtttctcatcatagcaatacaggtaccaaccaagcgggtacaaactacagtggcggtaacgcgactcagcaggatgatgttgcagaataattatcaaatattattcttaatataataaaaacataggtagggagactttacctatgtttttcctgtttttataaagtccatgaggtttcgcctttgtttgatcgttatgaaggtggcgaattagccgttttagtgcacgttttcttttcgcaagaaaaggatattgatgacttgcaagagtttgaatctttggtgacatctgccggtgtaaaaccagttcaaattattacagggagccgtagagcgcctcactccaaatattatgtgggagaaggtaaagcggaagaaatcgcagaagcagtaaaagcgagtggtgcagatgtggtgctatttaatcacgcactctcaccggcacaagaacgaaatctggaaagactttgtgaatgtcgtgtagttgatcgcacgggagttatcctcgatatttttgctcaacgagcaagaactcacgaaggaaagctacaggtagaactcgctcagttacgtcatttatcaacccgtttagttcgagggtggacacacttagaacgacaaaaaggggggattggattacgtggccctggcgaaacacagcttgaaacggaccgacgtttgctcagaggcaaaattagtcaaattctaatgcgtctaggcaaagttgaacgtcagcgtgaacaaggacgacaagcgcgaagtaaagctgatattccaacgttatctctggtgggttacaccaatgcgggtaagtcgagtttattcaatcgtataacctgtgcagatgtgtatgctgctgatcagttgtttgcgacactggatcctaccttaagacgaattcaggtcgatgatgttggtaccgtggtgttagctgatacggttggttttatccgacatctacctcatgatctggtggcggcatttaaggcaacgctacaagaaacacgtgaagcgacattgcttcttcatgttattgatgccgctgatagccgttttgaagagaacattcatgcagttgaaaatgtattagaagagattgatgctcacgagataccgacactgtatgtgatgaataaaattgatcttcttgaggacttcaccccaagaattgatcgaaatgaagataatttacctgttagggtttgggtttctgcacaaacaggtgaaggtattcctctgttatatcaggcgttgacagagcgcctttcaggtgagatcgcacacgttgaattgcgtttaccgccagaagaagcagggcgattacgtagccgtttttatcaattacaggctattgagcgtgaatggattgaaaaagacggtaaagttgggctaatcacccgaatgcctatggtagactggcatcgactttgcaagcaggagcctactttattggattacgtggtctgataattggccatactaaagaacattaactgagagctggcgatgaaatcggctcttaagcctgataaatctaatcataataatggagctagaacatggcgtggaatcagcccggtaacaacggacaagaccgcgacccgtgggggaaccgaaacggcggtaataataacggcgacgggaactctaacggtaatcaaggaggtcgggatcgtaaagcatcagatctcgatgatttgttccggaaactgagtgcaaaacttggcggtttcggtggtaaaaaaggaggaaactcctcttctgggcaaaatggcggacctcgtggtaatgctggaaacgtattagtttctcttgcattaggtgctgtggttgtcgtttgggctgccagtggtttttataccattaaagaagccgaacaaggtgttgtgactcgtttcggtaaattttaccaaatcgtcgagcctggtttaaactggaaaccgactttcattgatgaagttcagcctgtcaacgtaaaaaccatccgtgatttaactacgggtggcatgatgttgacatcagatgaaaacatggttcaagttgagataaacgttcaatatgttgtctcagatccagaagcatttctctttaatgtcacaacgccaatgaatagcctaggacaagcgacagacagtgccgtccgtggtgtcattggtcgttcagaaatggaaaagatcctgacatcgaaccgctcagaaattcgtgatcaaacccgtcaagaattagaagagacgatccgcccttataaaatggggatctccattgtggacgtcaacttccaagttgctcgcccaccagaagcggtcaaagcggcattcgatgacgtaattgcggcacgagaagaagagcagaaaaccattcgtcaggctgaggcttataaaaacgaagtgttaccattagcgaaaggtaacgcacaacgtatgattgaagaagcaaccgcttataaaacgagtgtggtgatgaaagcagaaggtgaggtggcgagtttcgccaaaatcttacctgaatatcgcgcagcaccggaaattactcgtgagcgtctgtatattgaaacaatggaaaaagtgttgtcgaaaacacgtaaagtcattgccaatgacaaaggtaacagtatgttggttctgcctttagagcaaatgttacgccagcaaccaaaagcgccaacgtcagttaatagtgtcacagaggcacctgcgcgtatttcaacccctacgccaagtaccaacacaacacctactcagaaaccagcaacaacttatggtaacggtggatatggtagcaataatagtggtggttatggtcagccttatggctctaatcaaggaggacaataatcatgcgtaaagttatcgctgttgttgcagttattattttagcgttgttgtactcctcagtatttgtcgtgcaacaatatgaacgcggtattattttacgtttctcgaaagtggtacgtgatggtgaaaataaaccggtcgtttatgaaccgggtattcactttaaaattccatttattgagaatgtgaaaaaactggatgcgcgtatccaaacgatgaatatccagcaagatcgcttcttatcaggtgagaacaaagacttgttagttgactcttatctgaaatggcgtatcagtgattttagtacttactacctagctactggtggtggtaatacgatgcaagcagaaaccttattgcgtcgtaaatttagtgaccgtttacgctctgaaattggtcgtatgagtgtaaaccaaattatcactgattcacgtggtcgtttaaccattgatgtacgtaatgcgttgaatgaaggtacaccttctcgcgataaaagtgatgcagatgatgctattgctattgctgcgaagaaagtggccgaagagaccaaaggtaaagctcctgctatcaatatgaacagtatggcggcattaggtattgaagtgattgatgttcgtatcaaacaaatcaacttaccaatggaagtttctgaagccatttatcaacgtatgcgtgcagagcgtgaagcggttgctcgtcgtcaccgttcacaaggtcaagaagaagcggtgaaaatccgtgctgcggcagataaaacagtgacagaaaccttagctgaatcggagcgtgaatcgttacgtattcgaggtgaaggggatgcgcaagcaactaaactatttgctgatgcattcagtcaagatcctgacttctatgcgtttatccgtagcttacgtgcttatgagaatagctttaataaagacggtaatgacgtcatggtgttaagtccagatagcgatttcttacgctatatgaaagcaccaactaaagcgagagcgattgaagagtaatcgtcatcgttcaagaaaataaataatcatcccctaagataaaacttaggggatttttttagcttttaatcaagcagatagaattaaaacaaataaagaaaatcgttttttattattgaatgaaacgaaaaatcgctcgcaaccatttccaaattgcctttagctgagatagtataaagtgaaaattgcatttcaagataaaccttcggcaatcccgaggcgtcttcttagccattttcacttttatgtcactctgcttcctgtttttgcgatcaaaactgttgataaaaatcacaaatatcttgtgatgtggttttttcgggcaaaaatattgacaatggcaagataatctattgcttaaaagcggggatggcataattagataaaatctactgtaactcttgaattgagatggtagaatccttttttaagcaaccgagtgtattttgaaatgagtaataacgttgtcgtattaggcacccaatggggtgacgaaggcaaaggcaagatcgtcgacttgctgacagaacgcgctaagtatgttgttcgttaccaaggcggacataacgcaggtcacaccctagtcattgacggtgaaaaaaccgttctccacttaatcccatcaggcattcttcgtgaaaatgttgtcagcatcatcgcaaacggtgtcgtattatcgccagaagcactgatgaaagaaatgacacagctcgaagagcgtggtattcctgttcgttcacgtctactgctgtcagaagcttgcccattaattctgccttatcacattgcattagataacgcccgtgaaaaggcgcgtggtgagaaagcgattggtactacgggtcgtggtattggtcctgcttatgaagataaagtcgcacgccgtggtttacgtgttggtgatctatttgataaaaaagcattcgctcagaagcttaaagagatcatcgaataccataatttccaactggttaattattacaaagttgagcctgttgattaccaaaaaaccttagacgatatcatggcgatcgctgatatcttaactgggatggttgttgacgtttctgacttactttacaaagcaacacaaaaaggtgagttagtgatgtttgaaggggcgcaaggtactctattagatatcgatcacggtacttatccgtatgtcacctcttcaaataccaccgcaggtggtgttgcaacaggttccggcttaggtcctcgttatgttggttatgtattaggtatcattaaagcctattctacccgtgttggtgcaggtccattccctacagaattatttgacgaaaccggcgatttcctgcgtgaaaaaggccaagagttcggtgcaacaacaggtcgtagtcgccgtactggttggttagatattattgctatccgccgtgctgttcaaatcaactcattgtcaggcttctgcatgaccaaacttgatgtcttagatggtctgaaagaagttaaagtgtgtgtaggttatcgcttaccaaatggcgaagtgattgaaactacaccattagcagcagatgattgggaaggtattgagcctatttatgaatctatgcctggctggaacgaaagcactttcggcgtaaaagataaagcacagttaccacaagccgcgttaaattatattaaacgcgttgaagagttaactggtgtgcctgttgatatcgtttctacaggtccagatcgttcagaaacgattattctccgtcatccatttgatgcataatttattgtattaattggtttgatgtgaaaatcgtccctgaaaatgacaggggcgattttttcgtatctgtaacaaagccgaactgagtcactatgttgattagcaataaaacgagaaacagtttcccgctcggttgcgtttttgttttagggctatggtcagaagtgaaataagataacgttattttgttgtcaactaagagaagcgatctgttgaaaagcgacaggatcgctttttctttgcctgtgatatcgctattattttaatggttgtggtgagtaagcctaaaagcgcggacttttgagtatatctttgctaaatgtccaaaaattaaacataatattgcttaataaaatgatattctcattactcattatttatcctttaacttctttaactgggagttttacttttcagaggtcattgtgcaattaaccagttttacagattatggattgcgggcgttgatatatatggcttcattgccagaaggcaaaatgacgagcatcaccgaagtgacgcaggtctatggtgtgtcacgtaatcatatggttaagattattaatcagctaagtcatatgggatttgtcgaagcgatacgtggaaaaaatggtggtatacgcttaggtaaacctgccgctgatattattgtcggcgaggtcgttcgtgctttagagccgctttcactggttaactgtagtgctgagttttgtcatatcaccccagcttgtcgattaaaacttgtattaaatcaagcgatagaacagtttttgaaagagctagaccgtcatacactggctgaattggtagaaaacaacagccccttatataaattgttattagaagatgtttgagtcgacaatttcatcattctgatagcttggaggtcataatgtccaaagatccttttcaggatagagaagccgaaaaatacgcctctccaattgctagtcgtgaatttattttagaagaaatgaagaaacgcccggccccgatgagccgtgaagatatcgcgcaggcattgaaaatttcaggtgaagaaaatctggaagcattacgtcgtcgtttacgggctatggaacgagatggtcagttagtttttactcgacgtcagtgttatgccttacctgaacgcctcgatctttggaaaggtaaagttatcggtcaccgtgacggctatggttttttacgtgcggaaggccaaaaggatgatctctatctttcacaagatgaaatgaaaaaaaccatgcatggtgatgtgattttagcgcaacccctaggcatggatagaaaagggcgtcgagaaggtcgcgtcgttcgtgttcttgaacccagaaacagccaaattgttgggcgctattttattgagtcaggtatgggatttgtggtacctgacgatagccgtttaagttttgatattcttatccctaaagaagatatcatgggcgcacgtatggggaatgtggtggtggttgaagttaccacaagaccaacacggcgtactcaagcggtaggacgcattgttgaaattttaggtgaaactatggggacgggaattgcggtagaaattgcactacgcacccatgaaattcctcatacttggccacctaaagtagaaaaagaaatcgctgatttaaaagaggatgtgccagagtcagcgaaacaaggtcgcgttgatttgcgtgatctccctttaattaccattgatggtgaagatgcgcgagactttgatgatgccgtttattgccagcgtaaaaaaggcgggggctggcgtttatgggtggcaattgcagatgtgagctattatgtacgccctcaaactgcattagacacagaagcgcgtagccgaggcaattcggtctattttccttctcaagttgtccctatgctgccagaagtactgtcgaatggattatgttcattaaatccacaagtcgaccgtttatgtatggtttgtgaaatgaccgtttctgagcaggggcgcctttcatcttataaattctatgaagccgtaatgagctctcatgcgcgaatgacttacaccaaagtatggaaaatcattcaaggtgatgaagagttacgtgagcactaccaaccgatcgtaaaagatattgagcacctttatgagctataccaagccctcgataaggcccgtgaacagcgtggtgccattggttttgaatcggaagaagcgaaatttattttcaatgcagaacgtcgtatcgatcgtatcgaaccggttgtacgtaatgatgcacataaattaattgaagagtgcatgattttagccaatattgcggcggcgcgttttgttgagaaaaatgaagagcctgcgttatatcgtgtgcatgataaacccaaagaagagagcgtaatgaatttacgttcggtatttaatgaactgggtttaacgttaccgggaggattaacaccggagccaggcgattatgcgcgggtcatgaaagaagtcgaagagcgtccagatcacgaaatgctacaaaccatggtattgcgctccatgaaacaggcaatttacgatcctgaaaatcgaggtcactttggtttagcattaaaatcttatgctcacttcacttcacccatccgtcgttatcctgacttagcattacatcgtgctattaaataccagatagcgaaacagcaaggccatggctcacaacgctggaccccaacgggtggctatcatagtgatatggataccatgcttcagttaggggaacactgctctttaactgaacgtcgggcggatgaagcaacccgtgatgtggctgattggctgaaatgtgattttatgcttgatcaaataggtcagcaatttaccggtattattaccagtgtcactggtttcggtttctttgtgcgcttaaacgatctatttattgatggtcttgttcatgtatccacattaaataatgattactatcaatttgataatgttggacaacgtttaattggtgagtcatcaggtcaggtatatcgtctgggtgatgaagttgaagtgaaagttgaagcggtcagtatggatgaacgtactattgacttctcattgatttcaacaacacgtaaagcacgtaaccccgggaaaacagcacgtgttcgtgcgttaaaagggggaaaagacaagaaaaatgcgagcagtagtaagtctcgtcgtcgtgatgccagcaaagacaaaaactttgaacctgatagtgcctttaggaacggtaaatcaagtaaagaaaaacagagcaaagataaagtcattaaagagaaaattgcgaaggacaaggcgagtactaaacgtaaaaaagcctctgcacaaaccaaaaagatagaggcgaaattaaaagccaaacgtgcggcgaaacgcactaaagcgtagttatacaacgaagtcattcactgtttgactcctattaaaaaggcggattttccgccttttatctgttattgtgccttttattttttaacgagtaacaaccgctatgagcgaagatattatttatggtattcacgcagtaaaagcactgcttgagcgtgatccgacacgttttaaagaagtttatgtgttaaaaggacgcgaagatcgtcgtttaatgccggtgatccatgcgctggaagaacaagggattttagttcaagttgctaatcgccaatggttagataatcaaactgaaggtgcggttcaccaagggataattgctaaggtaaaacctagtcgtcagtaccaagaacaagatttaccggacttattagctgaagtaggtacaccttttctattagtgttagatggtgtgactgatccacacaacttaggggcatgcttacgtagtgctgatgcggctggtgttcacgcagtcattgtaccaaaagatcgctcagctcaattaaatgccacggcgaaaaaagtcgcttgcggtgctgcagaaagcgtacctttgatccgtgtaaccaatctggcacgtactttacgcttactacaagaagagaacatctggattgttggcaccgcgggggaagcggatcatacattatatcaaagcaaactcacagggcctttagctttggttatgggggctgaaggtgaaggaatgcgccgtttaacccgcgaacattgtgatgagttaatcagtattcctatggcaggctcagtctcttcattaaatgtctccgtggcaaccggagtttgtttatttgaagcaatgcgtcagcgtatttctgtaaaataacactgcgcgtattttattctcttcctcccttgagttttattgcgtgggggggtatagttacgcgtcaattttttcagtcacacttaaacaagttccttgcctccatgggtggtgactgaccctgacaggaggctgataaatccgtaaggagcaatatcaaatgcgtcattacgaaatcgtttttatggttcacccagaccagagcgaacaagttcctggtatgatcgaacgttataaaaccgctatcactaatgctaatggtcagatccaccgtctcgaagactggggtcgtcgtcaactggcttatccaatcaacaaactgcacaaagcacactacgttctgatgaacgttgaagctccgcaagaagtgattgatgaactggaaactactttccgcttcaatgatgccgtgctccgcaacatgatcatgcgtactaaacacgcagtgactgaagcttcaccaatggttaaagcaaaagacgaacgtcgtcgcgatgttgctgaagatcttgatgaagaagaagttgatgatgtagcagaggattctgaagagtaattagtgttgtgacggctaatcgattagtgctaacaggcactgtgtgcaaagcattgatacgaaaagttagccctgctgggatcccgcattgccaatttgtgattgaacatcgttcaacacaagaagaagcgggattaaaaagacaatcatggtgcagaatgcccattattgccagtgggaaagcgttacaaactgatactcacagtataacggtcggtagcaaagttaccgtttcaggattcattagtagccatcaggcgagaaatggattgtttaaactggtattgcatgccgaacagattgaattgatagattctggagactagccatatggcacgttatttccgtcgtcgtaagttctgccgtttcacagcggaaggcgtacaagagattgattataaagacatcgctacgctgaaaaactatatcactgaaagtggtaaaattgtaccaagccgtatcaccggtactcgtgcaaaataccagcgtcagctggctcgtgctatcaagcgcgcgcgctacctgtctttattaccttatactgatcgtcatcagtaataggtattatatagtccattaatgacttgtagaggataaggtaatgcaaattattctgcttgataaagtagcgaatctgggtagcctgggtgatcaggttaacgtaaaatcgggctatgctcgtaactatttaatcccacagggtaaagctgtttctgcgactaagaaaaacatcgagtttttcgaagcgcgtcgtgctgagttagaagctaaattagctgaaactttagcggcagctgaagctcgtgcagcgaaaatcactgcactgggatctgtcactatcagctctaaagcgggtgacgaaggtaaactgtttggttcaatcggtacacgtgacatcgctgatgcagtaactgcagctggcgttgaaatttgtaagagcgaagttcgcctgccaaacggcgttctgcgtacaactggtgaccacgaagttcacttccaagttcacagtgacgtattcgctgaactgaatgtaatcatcgttgctgaataatcattagattaaatagttatgttgatagaaaaacgccagcttagctggcgttttttatataggttatttgctctatttctccacaccgcttgttgacactatggcgtacgataataactaccatcacttagccgtgtgaaggtaataacagtaccggtattgtcagtcacttcaagcatactcacttcaccttgtgaacctcgttgtaaacgaatggtttgtccggcgcgtaactggcttaacggcttttgtgggccttctgatttcgccatagtaaacgcatcattgacaagcaactgattatctctaaatagttgtgcaagggtttgcccctctttaatggtataagtttgccaattttcagtcgcggttgacggtgtttgaggcgttgtgtttactggcgtattgtcattggtattattggcttcaccttcttctggtaagtcttctgtctcttgctcagcatttagactatcttgtgctggtggtagtgtattagggacattttgtgtttcatttgagacagaaggtgctacaggcacaggaagatcttgtgtcgaagatgagggttgaggtggggtggtattttcacttgttggccagaaaaaaacgactaacaaaataatggcaataacaacgattgctcgacgatgtaagcctgggaatttgcccatattcacctcatgattgaactgtgaatcactatcactaattgtaacctcttttttatttcttgttgccatactagcacgaaccatgatccttacctgctccctgaattcttttcagaattatctctttaatttgattacgtccttgaaggtgttaccaaaagcacccgatgcttaatcgtctatagttgtgggattaagcgagacagaagaatactgagtgttatctattcaacggcattatgtggcgaatgtttagcatttatttgtttaatagacttactctgcttaatcaaatgttctatgttgcctcaccccttgcaacatgtagagatgccactatcactaataggtatataaaaaaaatgatcaaaaaaactagccattaaaataaaaaggcgctacattatcgcaactcaatattgttatattataacattacataaagaaggcgagtatgaaagaaaatattcatccacaatatcgtactgtcattttccatgacactagcgtagatgcttattttaaagtgggatcaaccattcaaactgataaaactattgagtatgaggggcaacgctatccttatgtcactttagatgtctcttctcagtctcatccattttataccggtaaacaaaaaacacattctcaagaaggtaatgtggcacgctttaataagcgttttggccgatttgttaattagggaagaaaaaatgcaagtattaagttcattaaagagtgcgaagctgcgccaccctgattgtaaagtggtacgccgtcgtggacgtctgtatgtaatttgcaaatcaaatccacgttttaaagccgttcaggggtaacctatgcaaaaaccaatcctttcttgtcttttgattatgggttttttaggtagtgctatgtctgttttggcacatggacatcatcatgaaaaagtacgcacacaagcacaaatagatgctgcgaatgggatttttgaggacaaggacgttctcaatcgctcattaagcgattgggatggcgtatggcaatctgttgaaccctatctgcgtagtggcgaattagatatcgttttgcaaaagaaagcggagacgaagcaagataaaacagtagaacaatatcgagcttactatacacaaggctataaaaccgatgttgatatgattggtattgagaataatatcgtagagtttcatcgtggtgataaagtcgatagctgtgaatatcactatgatggttatcgtattctacattatcaatcgggtaaaaaaggtgttcgctatctgtttagatgtgacgatgccaacagccaagctccacggtttattcagtttagcgatcatattattgcaccagaaaaagcacagcattttcatctatatatgggaaatagttcacaagatgaattacttaaagagctaactaattggccaacctattacccttattcaatgaaaggggaagatattgttcatgaaatgctttatcactaattaaagtgaagaaataacctattgggctgacatcaatacccttgatatttatcgagggtattgtttatccaaagcaccgtaaaaccccgtccttcaggtcggggatataaggcgtggttttttaactaactcggtgtttcctgttgctcaatgtactggcggataatggatattggtgcgccaccacaactccccgcgaaataactcggcgaccaaagaacccccttgtagtaatcacgttgtgcaatatcaggacgatcacgtcgaagtaatcgactcgatacccctttaaggctgttaaccagattagatatcgccagttttggcgggtaattaatcagtaaatgaacgtgatcccgttccccatccatttcaaccagttcaacatcaaaatcagcacaaacactggcaaagtagcctcgcaatttttcaattgcatcctgatcaaatatttttcgccggtattttgtgacaaagaccaaatggacgtgcatcaggaataaacaatgtctgccacggcgaatattagtttcatttttcatagaccaaagtataatagataatatgaaacgtctacaagcctttaaattccagttaagacctaatggtcagcaagagcgtgagatgagacgctttgcaggggcttgtcgttttgttttcaatcgggcattagcacgtcagaatgaaaaccacgaagcagggaataaatacattccctatacaaaaatggcttcatggctcattgagtggaaatctgacacagagacacaatggttgaaggaagccccatcacaacccttacaacagtcacttaaagatttggaacgggcttacaagaattttttccagcagcgtaccgcttttcctcgattcaagaaacgcggtaaaaatgacgcttttcgctacccgcagggcgtgaagctcgatcaatccaatagtcgtatatcattgccaaagttgggatggatgcgctaccgcaacagtcgtgaagtcgtcggagaagtgagaaacgtcacggtcagtcagtcatgcggtaaatggtacgtcagcattcagactgagcatgaagcgacagaaccacaacatgaatcaacctcaatagtcgggcttgatgcaggcgttacaaaacttgccacgctttcagacggtacggtatatccgcccgtcagcagttttaaagtcaaccagcgaaagctggcaaggcttcaacggaaattaagccgtaaaatcaaattcagtgccaactggcaaaaacaaaagcgcaaaattcaacgtctgcattctcatattgccaatataaggaaagactaccttcacaaagtcaccagcgaaatcagcaaaaaccacgcaatgattgtcattgaggacttaaaggtcagtaacatgtctaaatcggcaaaaggtacgacagaacggcctggacggaacgtaaaagctaaatctggtttaaaccgctcaatactggagcagggctggtatgaaatgcgccgtcagcttgagtacaagcagctctggcgaggtggtcaggtactggcaataccccctgcctacaccagtcagaagtgcgcttgctgtggtcatacagcaaaggaaaaccgccagtcacaaagtcaattcgagtgccttgaatgtggatatacagcgaatgctgatatcaacggggcacgtaacattttagcggcaggacatgccgtgctagcctgtggagggagggtgcagtcagaccgcccgtcgaagcaggaacccgccgaggtgattcagacatcagtctgaacgcagtagggatccacgtcctttagggcgtggaggatgtcaattaataagagataatggttgcaaaaagcaatcgcgtccttgcgatgacttttactgttaatcagtggcctcgtttacaggccttggcagaggtatttcatttccatatagtcctcaataccatgctcagagccttcacgacctaagccagactgctttataccaccgaaaggagccacttcattggaaattagacctgtgttaataccgaccatgccatattctagattttcagccacacgccaaatacgttgtggatcttcactgtagaaataagcggctaagccatagatggtattattggctagatgtactacttcttcttcattgtcaaaaatgactaaaggtgccacggggccaaagatctcttcttcaagaatatgactatcagcaggcacattaccgaccacggtaggctgaaagaaattttcacctgctttatctctttcaccaccacatagcagtgtcgcaccgcgttgtaaggtatcagcaaggagtgattgtgatttttctaccgccttatgattaataagaggcccaatagtcacgccttcggtaaagccattaccgacttttagttttttaacctctgcaacaaagcgttcactaaattgttgatatacatctttatggatataaaaacgatttgcacacacgcaagtctgtccggcgttacggaatttcgcccccatagcacctgcaaccgctttctcaatatcggcgtcattaaagacaataaatggcgcatttccccctagctccagtgagacttttttcacactgtcagcacattggcgcattaataaacggccaacccctgtagagccagtaaaactcaatttacgcacgcggttgtctgatgtgaacacttcaccgattttaactgcatcaccggtgacaatattaataacaccggcaggtattcctgcttgcgcggctaattcagctaatgcaagggctgtatagggggtttcgttggcaggttttatcaccatagtacaccccgcggctaatgctggggctgctttacgggtgatcatggcagcagggaagttccaaggtgtgatagccgcacaaacaccaatcccttgtttgatcaccattagacgcttatctgatgaaggggaggggataatttcaccgttggttcttttaccttgctcagcaaaccactcaataaatgaggctgcgtaggtgatttcgccttccgcttcggccacgggtttaccttgttcaaacgtcatcagttctgcaagttgacgcttgttatcctgtatcagttggaaccagcgttgcagtaaagtgcttctttgatgtgcggttaacgcacgccatgtcggtaatgctttggcggctgcatcaacagccgctttggcttcttctgttgccatatttggcacagtaccaatgggctgatttgttgcaggatcaatcacttcaaccgtgtctttgctttttgcatcacaccaaataccgtcaatatatccttgttcacggaaatagggattgtcagttattttcacttcgtacctctctgaacatatatattgatattgagcgctgggttaacagagctaccttgtctttaattatatgcttgtgtgaggggcttgtgaaaaaaagtctgaaaaatatcgtcaagaaaggtcaaaatccatgacaaatagcgcaaattgatggcgttttcgacgaataatcgcgattagccaagacgggaggtttacgctctagcttaccactgttattcttggcactaactttcataaaaacaggtattttttcatgtcaaaaccatcatttgattctattgaatcgcaggcaagttacggtattggtctgcaagtcggccaacaactgactgaatcaggtcttcaaggattagagccagcagcactgcttgccggcttgactgacgcgttagaaggcaatactccttctgtacctgttgaaacgttacacaatgctttacgtactatgcatgagcgtgctgaagctgttcgtcaagagcgtcaagcggcactggcagaagccggcaaagtattcttagcagaaaatgtaaaaaaagaaggcgtgcaggttactgaatctggtttacagtacaaagtactgaaagcaggagatggcgctattccagctcgtactgatcatgttcgtgtgcattatactggtcgtttaatcgatggtacggtatttgatagctcagtacagcgtggtcagcctgcagaattccctgttaatggggtgattgcaggatggattgaagcattaactttgatgccagtaggttctaaatgggaattatatattccttaccaattagcttatggtgaacgtggtgcgggggcggctattcctccttttgcaacattagttttcgaagtagaactattagaaattttataatttcttcttctgcaaaaaataacactatagccggttttttccggctatttttgtctctatactagagtaaagagagtgcaagataattgatttttataagagtgagtaccattcttataaaaataagtgaggtgcattatgttagaacaagtcagcgaattagcccgccaagcgggtcaggcgataatgcaaatttatcaacaatcagcgccaattgaagtacaggaaaagagtgaccattcaccggttactgcagcagatttagccgcccatcaaattattaagcaaggacttgccagtattgcgccagatattcctcaattatctgaagaagatcctcctgcgtgggaagaacgtcgccattggcaacgttattggctgattgatcccctcgatggtaccaaagagtttatcaataaaaatggtgagtttacggttaatattgcgttgattgaacagggtgtgccggtattaggcgttgtgtatgcaccagtacaaaatattctctactcagcagccaataaacaggcatggaaagaaacctgtggtcagcgtttaccaataaaagtcagccgtgctgaaccccccgtgattgttattagtcgttctcatcaagatgatgaattaaaagaatatttatcgcaattgggtgagcaccaaacagtggctgttggatcttcattaaaattttgtctagtggcggaaggaaaagctcagctttatcctcgttttggacctactcatacatgggatactgcagcaggacacgccattgcgatagccgcaggggcacatgttaccgattggaaaggggtgacacttgattattcaccgagagaatcactgataaatcctggttttagagtttctattttctaatgataacgagagcagagcccttaagtttaaagggctccgatacagataatttaaatactattctttaattaagtcattgataaggttaatggcggaagttatttctgcaccacttaatacaccttctttgacaaaacgaacttttccttgtttatccagcacaataattgctgaactctctttttctagtccccaacctttttgcgctacaccatcagcatcaacaataaattgtgaccaaggaaactcttttttactgtcttcaacactaccgcgaacaaaaggcccagtaccaaagatagcatcatcagtattgatgatagtggttgtctgataactattttgtggaaatttggcttgtttgatggcttcaatcagtggcgcattcatctctttagccttactgcgtccagcgatatgttgaattgtgcgtactttgccactaagtagtccgctattccaattttgatagctaaatttatctttggcaccatcataaagaagctcccctttgtcactcacagagatcgccggtaggagagtttcttcagtaatattatgggcaaatacccatgtagatgtgctaagcaaaagtgcagccaaggttattttgtgcatcgttattgtcctattattaaattcgactttatcggctatttaagcatagaggctaaaaaagaataatacctcattgttgatacatttttttaacatatagggtgtaagataaagtattcacagtctcgacttatcttctttactgtcaataagtgtaaaaatagataagaaatttaaataaatggaacctagtacttataattaggtctttaaatttggtatataaagatcggtctttatgactgattaaattcacaactgagcatgggagactaactgaaagatgaagatcttcaatcgctataacccagaaaaaattgctctctacgttaagacgttatttcgtggacggttttatatcaaaggaatgggcgcatttgagttcgattacggtaaaattttattgccgaaaataaaagataagctgcattttaatgtgatgagtgaagttaaccagcaggtggttttactcaaagctgaaatgggctaacttttatctgatagataactgagtctatatcttgtgcttttacgataagactcagttattaatttcagtttgttaccagttgatttaggctttatgctcttcgtgctcaaaaggcacttctgccgttgtttgaggagcaggtattgcttcttgcaaaaccggttttactggcggaatatcatcaattttagtgacaagcagttgatcaattttatagttatcaatatccaccacttcaaatttataacctgcaaacttcacatagtcagtacgtttggggatcttacgcaaacggaacatcataaacccagcaatggtttcgtaattgctagaatccgggaaatcatcaatatctaatgcccgcataacatcatcaataggtgttccaccttcaaccaaccatgaatgctcatcacgactgacgatttgctcttcttggcccgggccaatcagatcgcccattaaagtggtcatcacgtcatttaaggtgataacgcccatcaccatcgcatattcattgagaataatggcaaaatcttcccctgaggttttaaagctttctagcatgtcagataaagttaaggtatccggaataataagggctttacggatatgcacaccttctttgaggttaagactttgcccattgatcacacggttgagtagctcttttgaatctacataaccaataatatggtctatatccccttcacaaactaagaatttagagtggggctgagtggcaattttatgcttaatatcttcttctgtctcttcgcgatcaaagtagacaacatcttcacgtggtgtcatggctgatggtacggtacgtgattctaattcaaagacattttcaattaattcgtgctcttgtttacgtaatacccccgctacggcaccggcttcgacaatcgcaaagatatcatcagatgtaatatcttcatttcttaccatcgggattttaaatagtttaaagataagatctgccatgccattaaacaaccaaactaaagggcggaataaggcgagacaaaaacgcataggattaacaattttcagtgcaatgacttctggcttgatcatgccgatacgtttaggagttaaatcggcaagcagaataaacatcgatgtgacgataataaatgaacagaccgatcctaattgttgcgcgagaggtgcttctaaaaagcgggaaaagagatcttttaatgcgggagaaaaagcagattcaccgacaatacccgccaaaatggcaacggcgttaagaccaatttgtaccacggtaaaaaacataccgggggtttcttgcatttttaatacacgagcagcgttgatatttccttcgtcaaccaactgtttgagtttaatacgacgggaggccgccagtgatatttcagacagcgaaaaaaaggcgctaatggcacacagcaaaagcacaatgagtaaactattaagcatataaggctcacatcacccagagtattaaatccagagggtaatacttgagtgttaataatcgaagataaatcaatatattgtgatagactattttataaaaatagacacaaagatagataagagggcgtaattatatcatcgccctgctattttctgctagtgttagtttgccggtggaaaacagataccaatgccaccaagtccacaataaccttgagggtttttaaataggtattgctgatgataatcttcagcaaaatagaaaggtccggcaggttgtatttcagtggtgatctctttatgtgccccttcactattgatagcttgttgataacgttgttttgactcaatagcttgtgcatattgctctggggttagggtataaatggccgagcgatattggctaccaatatcattaccttggcgcataccttgggaagggtcatgattctcccaaaaaatagccaataattgttgatagctgataagggtcggatcaaataccacacgaacgacctctgcatgaccggtacggccttggcaaacttgctcataggtgggattttctgttacaccaccgctataaccggcacttgtgctataaacaccgggttgttgccaaaataggcgttcaacgccccaaaagcagcccatggcaaaataagcaatttgcatattttctgggatctcacggatagaatgcccattgacggcatgattagcagaaatttctaatggcgttgtgctgccgattacggcatgctcaggatgataagctttatgttgcaaggtaaactccaaattttatatttgtaaacgctttactatggtaaaggtttaatattgttataaactaaatctacaataaagcttaaaactatttgtcgtcaattaccgaatgatataaataatattgaggagaaaacgtgccgagatactccgttatctacgttctctgtctgtcttctataacgtcttttgcttatggggcaaatttacgtttaaaagtagaaggtttagaagggcaactcgaaaagaatgtacgagtccagctatcaaacataacaacagaagaagttgcaccagacgggcgttttcgtgcgcgtgttgaaaaggcaattaaagagggcctacggcctttaggttattatcagccaacggtcactttctcttatcaagaaaatacccctccgacacgccctgtattaacagcaaaggttgagcttggtattcccgtactgttaaaaggggtcaatattgtactggaagggggagctaaaacagatgaacaatatgccaaagtgattaaagaaaacactccccctcttgatagtgtgttaaatcatgccgaatatgaaaaattaaaaggctcgttaacagggcttgctattcgtcgtggttactttgatgcagatatggaaaaaagccagctcggtgtctctttagataatcacgcctcttattgggattttgtctttaatagtggtgaacgttaccgttttggtaaagtgaattatactggctcacaaattcgtgaagactacctacaaaatattgtgccttttaaagaaggggaatattactcttctgaagatttggcagagtttaatcgacgcttagctgccacaggatggtttaattcggcggttgtcacacctaatatcgctaaagcacgtagtgaaggcaattatttgctaccaatggatgccgttgttacccctcgttcacgtaactatatggagctagggggcggttttgccacagatgtcggacctcgattaaatatgcagtgggataaaccttggataaattctaggggccatagtttaacatcgaatatgagtatttctaagcctgagcaatctattggtgctaattataaaattccattaaaagttaacccattagaacaatattatggcattcaaagcggctataaacgtacagatttaaatgatactcgttcggataccaccacactgaacgtttctcgtaactgggatatgtcaacgggatggcaatacagtattaatacccgctggagtctgagccactttacccaaggtgatgtgaccaatacaaccatgttgctttatcctggtgcgaatgcaagtcgcgtacgccaacggggtggcatgatgccttattggggggatagccaacgttattcagtcgattattccaataaaatatggggatctgatgttgaatttctcgcactacaagctcagcaagtgtggatacgcacaccttgggaaggccaccgttttgtggtcagagggacgtttggctggattgaaacgaatcaatttgagaaagtaccacccgaattacgtttctttgctggtggcgatagaagtattaggggttataaataccaaagtatttcaccggaagatagcaaaggtaaattaacaggggcatcaagaatgctaacgggatctgctgaataccaatataacgtaactggaaattggtggggagctgtatttgttgatagtggtgaagccgttaacgattttacgaaaagtgattttaaaacaggtgctggtgcgggggttcgttgggcatctccagtcgggcctgtaaagtttgatttagccgttccagtcaatagtggtgaagagcgtaagttacagttttatattgggttaggagctgagttatgatgaagtggttgaaaaggataacactaacgctacttatcatcattttactggttttaggtgctcttgcatggattttagggacgcaatcagggctacattttgccattaatagtgcagctcgttgggtgccaggtttaaccattaacagtgttaatggcggttggcaagatttacgtttaacgggtgttgagtatcaaatgccgggtgtagacgtcaatgtgggggagttatcactaggcttaaatttaagctgcttgaaggacaaacaactgtgtgttgaggccttaggcacacgtgatgttatcgttaatgtagataccagtgcactccctccagcacaagaaacacccccttctgagcctttaactgagcttaatgcccctttacctatctatttaaactctctctcattagccaatacgcgtgtacaaattgatgatatggccctatcactcaatgagtttactacggcagcacaatgggaagggcgtcaagttaccttaaaaccgacagtcattaatgatttgttggtggcgttaccgaaaacacccgaagacggtagtgttgccgccatggcgcaagatgtaaaagaagttgcagcaacgacgcctcaagcggagcctaaaacaccgcaagagcaagagcaggcactagctgacactattaagacaattttcgccaagcctttattagcgcagttacccgaaattattattcctgttgatatcaatgtggaggggatagaaggtaaacagttacaagttagtggtgatacgcctgtgactattaatcaactctcttttcaagccaatacgcaaggtcaacaggttaatctcactaggctcagtattgatgcgccagaaggcaaagtcagtttaaacggtcaaattacactggataaacagtggccggttaatctagatatgcaagcgatgcttcgtgagatggcaggattggaagagtttaaagatcagcaagcgacactgtccttacaaggtgcgatacttgatgagttaaaactcgcactctctttaacaggaactgttaccgcaagccttgatgcacaagctgagctcgctaaagcacatcttccactaaaattaaccttagagagccaaaaagtgcgttggcctttaacgggagatgtgcagtatcaacttaatgatactcgactacgtcttaatgggcagacggataattatgatctttcattacgttctaatattgaaggacaagagatccctccagccaaattgaccctagacgctaaagggaatgaagagaaaataacactcactcgtttgcgtttagctgcattacaaggtcatgcggatattaccggtgtggcagattggagtaaggcgattagctggaatgcattattgactatctctggtattaatacagctaaacaatatcccgatatgccagcgaaattagatggacgtattgctacaacgggtagcctgtatggaggaagttggcaactgcgagtgcctgaaattaccttagatggtaatttaaaaaataatcttattaaggcgcgaggaaacgcctatggtaatgattcggggcaatggaatattcctcaattaaccttaattctaggtaaaaataatctcgatattgcggggcacttaggtgatcagtgggcgcttgatgcgaacatcaatgctccggggttaaatggtttagtgccggggttagcgggcgttattaaagggaaagtgaatgttcgcggtgatattaataagccgaaaattattgctgatatcaatgcacaagggatcaaatggcaagatcagctcagtgttgggtcagttgtcgttaaaggtgacattcagtcagatgacgtgatcagtggcaaactggcaattacggcacgtcagttaaaacaggctgatttgattattcgtcaattaacgctagatgcggccgggacagaaaaacagcataagcttaccttgaaaatggatggggaacccgtatcgggtggcctgacattagccggctcgtttgataaagaaaaacagcagtggcaaggcacacttaacaataccgcatttgatacgcctgtaggcgaatggcgtttaaataaagcgatggcgctaaatttattagcggaaaaacagcaagtgacgattggttcacattgctgggtaaatcctaatgcacaactgtgtgtacctaaagagatcactgtaggtgagagtggtagtgcggcaatcacgttaacacgttttgatttagccatgataaaaccattcttacctcctgaaactgcgctacgcggtgtctttacgggagatgcaacggcaacttggaatgcgaaaggcggattacctaaagcgtcagttaaccttaaaggtcagggcgttggtgtaaaacaaaatgtcgatggtacggtattacctattgattttgatgcagttacgttaaatgcgggtatcaataatggtaaagcgaccttgcaatggttaattagtattgccggtaatggtgactttaaaggtcatgtcaatgttgctgatctagaaaaaacacgtcaattatcaggtacggttgatattgataacctgacattagatctgattaagcctttcttgggtaaaggtgaaatagcacaaggtagtgtaggggcacagctacgtttaggagggaatgcacaatcaccattgctatttgggcagtttggtattaaccagttaaaagtagttggtcactggatcccatttgacattaccaaagggaatgtcgatattcgctttaatggtgcgacttctgatttaagcggtagaatcgaaacaccggaaggttatttaaatctgacggggaatgcggactggcgcaaactagatgagtggcgtgccgtggtggctgcaaatggcaataaactgcgtgtgtcattaccaccaatggttcgtattgatgttaacccagacttagtttttgaagctaatccacatttgcttaaattagatggtcgtattgatatcccttgggctcgtatcgtggtgcaggaattacccgagtctgcggtgtcggcctcttctgatgaagtgatgttagacaaagaattacaacctatagcaccaaagcagacttctatacctattcaaagtaatttggcgattaatattggcgatgatgttacattagatgcctttgggttgaaagccagattaacaggggcattaaaagttgctcaaagtaagcaggggttgggattaaatggtcaagtggatattcctcgcggggaattcaaagcttatggacaagatttacaagtacgtaaagggcaaatcttgttctcagggccggttgatcagccatacttaaatattgaggcgatacgtaaccctgataatacggcagataatgtcattgctggggttaaagtcaccggacttgcggataagccgaaagtggaaatattctctgagccggccaaaacacaacaagaagcattatcctacttgttaagaggggaaggattagcaagtggtgattctgattcagcacaaatgacagccatgctaataggattaggtgttggacaaagtggacaactcgtaggacgtattggcgaaacctttggtatttctgatttagcgttagatacacaaggtgtaggggatagttcacaagttgtcgtcagtggtaagataaccgatgatttacaagtgaagtatgggatgggtatatttgattcgctagcgacgttaacattacgttatcgcttgatgcccaggttgtatttacaagcagtgtctggtatgaatcaggcaatagatctgctttatcaatttgagttttaatttatatgcgaattattgtttatggaagtttacggcgaaatcagggtaaccatcactggatgacctacgctcagctattaggtgagtataaattagcggggtataaactctatgatttagggttttatcctgctgtggttgaaggtgatggtgaaatagaatgtgaagtttatcggatcacgccttccattttgacggagcttgatgaactgaaaaaaaatgatcaagattacaagcgccagttgatatcaacaccttatggtagtgcttggatctatctttatcaaaagccagttgatgggttgcgagaaatcaaaagtggagattggctaaaacgccacgaagaagagtaataggcttacgaaagctgactcaataatgattaaaaaagctcgatatatatcgagcttttttatttttactaaaagtagtatttatattttaaaatttaaataaataattattacttcgttttttatctaaattgatatgaaaataattaatggtagagctgattgacagaaaaataacttcagtgttaaaacagttttgcttaagaaggaaagatataacgacttattattaaatagcgaaacaaggtaatttatggacaaattaaacgatattactcaactttataataatccaccaaaagatgtaaaacataatatagtcaatcatcgttttacggatatgatgctacaaactaaaactgttgcaacagaagcattagataaattagcttatcttgcaggtattaaaaatgcacctgctgatgataagtatttaaaattaaacaccactagcttagatgcgttactaaaaagtgcgaagtcacttggttatgatatcgaagtcgtcagtctttaatcaataagcagccataaggctgctttttaaatgaaaggaggcaatagtgaataaggatattaatgaacttaataaagatattaatattgtcggattacattggattgaacgctggcgagtgaataatggaaaacatcagtcttatgttattcctttcgcaacaacctatcctattaatattgtttatcacggtaaaagcgaatttaaatatgggcagtatggcattcatcttggccagcaagatacactcacctttttaggtgataaaaaacaaaagatactggctaaatttattgattgtcgtaaaaactcaccgacatttaaatcagaattaagtttggagataaccccatcatccgcaagaacacttattattcccccaggagttgctcatactttttcccatctagaaaatgtttttaccttaaatagctactctctttttttacctactatcgagcaattagcaagtgaaacattaaactggtcacctaataatgatgtgataaatttgccggaagatatcgatattaatgagattgaaggctatgagccgatgacagaagaagcttcggcgctggtctactatcgagttgctgagatacaacagcagtggttaagccaacatcgatttttacactctgaaactcgtaaaattcgcttagataatggcgatgaaattaatgtaaggttgcgagagaaaattgccgatgttcaaaaacaatcattacctacatccactattttaggtgtcgaatttcgtgaaatggcgaccctgcatacgggcaaagagagtggcattgttccattaacgcgacaatcccctatgtatctagtcgaacatggtcaggaggcttatgatttcgactcttatggattacatttagggcaagaagatcatttaacttttttaggaaattcctcgggtaaaatcactattaagctggtggatatgcgtgaagattcgcctacgctattttatgaagatgaaatggtttttgatccggcacccaatattgaattagtgatcccctgtggtgttgcccatgccttatttaatatggcgaatatcattactgtgaatcgacctgttatctatttggacgaagaaaaagaatatattccgggtcatgatgtgattgattggaaaatcgctaataaaaattatcaagcttatcgtgttaataaaatagcagcagatttaacctattatcaatttcttgtttctaaacaacaagcgttaatgaaacataagcccacccatcataccccaaaatcgattattgtttatgatgaaaataatcagcctattaaagtattaattaaagaaaaggtgtaacatctattatgcgtattgtctttttctatatgctttttttggtattaagtgcagatggtctaatggtttttttgacacctgttattgtttatcaattaacaacaagcattgaatatgcgggattgacatacgctttatggtggttaccacgtatttttttaataccgcttattggtcaatatattgatggtctaggtgtccgtcctgtttctgttatttccgatagctgtaaaattatcggttgtttatttttattaatagtagatttttcctctgatttagttattgcaattagttttggattagtgggtagcttaatttctattggtaattcacagacactgatttcatatgaaaaaattattgccttgatgagtcgccataaagaatatcatattaatataatgtctcgaatggattttttgggcatgatcattggcccattaatcggtatgttatttattgattatggttaccattatttactgattattccctgtctattttatttcattaacgccgtgttctttttgttcttttacttagtgccaaaacagcgccaatctgccactcagttacatagactaacagagacattacaggtgacgaaaaggatagtggtgatttttacgtctcctattttggttttttctattttaattgctatcggcaataatatgtttgatggattaattgagtcgagtggggcggcgttgatcgaccaatcgatgaatttacccattaaatattatggctttattgatatttctgcggggatctgtggcgtgataggaacttatttatatggttatctaacccattatttaaatcgaaaattattaatgtctctatcaatttgtatcattacaataagttcttttctattggttatttttcaacatgatatcacggcttttattctcttttatgccctatccattattggtaaggttttttcagggaatattttacggatgttaagaatagaaattattcctgtgacacaattagccagcatttcctcactgattatattgtttaatcaactgattttgcctattgttgggggattgctctttttctctacagggaatatttcgacagtatatatattgatgataatcgctatggcgatcaccttggtgagtggcgtaatgcttattatgcggttaaaccataaaaaagagataatcataaaataagcccacatttgaagtgggcttattttggctaagcaaccaatggattacttagcaacgctaattctaatgacacagaattatttttttgcgcgttcaaaagaagacagaatttcagctttagccgcttctacgccttcccaaccatcaacttttacccatttaccagattctaaatctttgtaatgttcgaagaagtgtttgatttgagcttttaataattcaggtagatcgttcacatctttaatgtgatcgtattctttacttagtttggtgtgtggtactgcaaccagttttgcatcttcacctgattcatcagtcattttcagtacgccaacaggacggcaacgaatgactgaacctggttgtaatgggtatggagttggaaccagaacgtctactggatcaccatctaaagataatgtgttgttgatgtaaccgtagttgcatgggtagaacatcgctgttgacataaaacggtcaacgaacagtgcaccactttctttatcaacttcgtatttgattggatcagcattggctggaatttcaataacaacatagatatcttctggtagttctttaccagcaggaacatgattcaggctcataaaaaatttcctatgaaaaattaatttgacgtggctcgtagtatagcgaaaagtttttaacaatacccgttttttgccgtacaggttgccttttgaggtaaaaataagcaacaaatacacgaattagctattttgggagatgaaaaaaccggacgcgttaattaagcccggtttaactatatcctgacaaaaagaaaatttattcttcgtctggatattgagccataaatgcttctgcttgttcgaccatcgctttagtacccacaaagaatggcatgcgttggtgcaactctgttggtttgatatctaaaatacgatctttaccattactggctttaccacccgcttgttccgcgaggaatgccattggattgcattcataaagtaagcgtaatttaccatttggatgacttgccgtacttgggtaaatataaatcccccctttgagcaagttacgatggaaatccgcaaccaaagagccaatatagcgagttgtataaggacggttagtcgttgcatcctgctcttggcaatacttgatgtatttttttacccctaatgggaatttaatgtagttaccttcattgattgaatacatatttccggtaggcggaaaatgaacactttcgtgagataaacagaaaacccctaaagaaggatcgtaagtaaaggcatgtacaccacaaccggtagtgtaaaccaacatagtagatgagccataaacgacataacccgcagcaacttggcgattaccgggttgcaggaaatcatctagtgtcactggttggccaataggcgtaatacggtggtaaatagagaaaatagtaccaacggaaacgtttacatcgatattagaagaaccatccaatggatccattaataccacatacttggcattttccgcacgatcaccttcaaagataacgatatcgtcttcttcttccgaaccgatccccgcaacttcaccacgagctttaagtgctgcttttagtttctcattcgcgtaaagatccagtttcatctgggcttcaccttgaacattagaaacaccgttagtgccaagaatatcgactaacccagctttattaatatcacggtgaataattttagccccaagcttaatggctgacagtaatgccgttaattcgccagttgcatggggaaaatcttgttgtttctcgacgataaattcgcctaatgttttcatgacgtgggtcctgaatgtgaatggataaaatataaaaaggaaaaaagtttccttattagtggcaagtttatccaaagaatcgcatgattcaaaggttaatccgtttctaatctgctttttgatggttagaatagtgaccaacttcatgctattggaaagaaattcatgcacattcatattcttggtatttgtggcacctttatgggaagtcttgccatcttagctcgagcgaaagggcataaagtaactggctctgatgcaaatgtttatcctccaatgagcacattattggaaaatcaaggcattgagctaatcgaaggttatgatccacaacaattagaacctgctcctgacatggtgattattggcaatgcgatgactcgagggaatccttgtgttgaagcggtacttgaaaaaggattgccttacacatcagggccacaatggttacatgactatattttgcctgagcgttgggttttggccgttgcgggtacccatggtaaaacgactacggcaggtatgctggcttggattttagaagattgtggttatcaacctggttttttaattggtggtgtgccgggtaactttcaagtttcagcacaattgggggaaagcccgttttttgttattgaagctgatgagtatgacagtgctttctttgataaacgttctaaatttgttcattactcgccacgtacgcttatcttaaataatctggaattcgatcatgcagatatttttgatgatctaacggcgattcaaaaacagtttcatcatttagtccgtattgtgccgggcagtggcaaaattatcatgcctgataacgatctgaacttaaaacagaccattggtatgggatgttggagtgaggaagagtacaccggtgagacgggtgattggcaggcgaaaaagatcagtaatgacagtagccactttgcagtgttccataaaggtgagcaagtcggtgaggtttgttggggactttcgggtgaacacaatatgcaaaatggcttaatggccattgtggcagctcaccacgttggtgtattaccggtagatgcatgcgcagcactcaataaatttattaacgcccgtcgtcgtttagagttacggggtgaagtaaatcaagtgagtgtttatgatgactttgcccatcatcctacggcgattttagcaacccttgaagcgctacgtagtaaagttggcggaacagcacgtattattgcggtattagaacctcgctctaatacgatgaagatggggatcagtaaagatgatatcgccccggcattgggacgtgctgatgaagttttcttatttcagccacctaacattcaatggttagtcagtgatattgctgagaagtgtgtacagcctgctcgttggagcacggatattgatacattagtggagatggttgctaaagaagctaaaccgggtgatcatattttgatcatgagcaatggtggctttggtggtatacatgaaaaactcctggcgaaattagccacaccaaaatcatctgtggatcaatattaatttaaataagtaagccactgaaatttcagtggcttactgtttatgacctattttcctgaagtcgctatttataattcctgatcaaataggtttaaaatcgcatctcgtagttcttctgttgagaatcctggcgcgggtgtagaaaaaatagtgtcatcaccagcgatacttccgaggatcccttctgctttacctaaagaatctaataaacgtgcaataagctgtgcggcaccggggctggttctaataaccactactgagtggttatggtcaatatcaagtaccaaatttttcaatgggctacttgctgttggtacaccaagttctgttggcaggcagtaaaccatctccattttggcattacgcgttcttactgcgccaaattttgttagcatacgagagattttagactggttaatattatcaaaaccagcttcttgtaatgcagttacaatctcgccttgtgaactgaatttttcttctttcagcagggctttaaatgctttaaccaagtcttcttgcttagaaggagtgcgcatagttcacctttagtgagttatcaataactcgcacattatgcagagaagtgaatttttatgcaacattagctccgttaatcttgtttctcttcttggttgatgtgtgtttttgtgtgttaactcaaaaaagttttatttctcgatattgaatgcgataatcttgattaggtaaataatttgttaactaaatgataatcttaaatgattatgcaatatgagatagcgcgtttagctcttagtgatatttattggaattatttctcaaaagagtgcccgctatctcattaacagataagcaatttgtttagaataaccgaagtattattttttactacaaatgccttattatgcaatatagctgttaaataattgttttctttactaggtgtgttgcgtaatagtgagtatatcaaaggcgttccactatctcgtaaactaaggagtatcagaatgaaagtagcagttctcggtgcagcgggtggtattggtcaggcactggcacttcttcttaaaaatcagcttccagctggtagtgaactctctttatatgatatcgctccggttacaccgggtgttgcagcggacttaagtcatatacctactcaagtaagggtaaaaggttttgctggcgaagatccttctcctgcattaaaagatgcagatgttgttttaatttctgccggtgttgcccgtaaaccgggtatggatcgctctgatcttttcaatgtaaatgcagggatcgtgcgtaatcttattgaaaaagttgcacaaaactgccctaaggcgcttattggtatcattactaatccagtcaatactacggttgctatcgctgctgaagtactgaaaaaagccggtgtttatgataaaaaacgcctatttggtgtgacaacactggatattatccgtgcgaatacttttgttgctgaattaaaaggcaaagatccacaaacaacgaatgttccggtcattggtggacactcaggtgtcactattcttcctttgctatctcaagtagccggtgtgtcatttactgatgaagaagttgctgcattaacaaaacgtattcaaaatgcggggactgaggttgttgaagctaaagcgggtggcggatcagccacattatcaatgggacaagcagctgcgcgctttggtctttcattgatccgtgctttaaatggcgaaaaagatgttattgagtgcacctataccgaaggcgatggtgaacatgcccgtttctttgcacaacctgttcgtttaggtaagaatggtgttgaagaatatctaccaatcggtcaattaagtgattttgaaaaacaatctcttaatggcatgttggatgtattgaaaaaagatataattcttggcgaagaatttattaataaataaaaaataacttttttgctttaaaataatgtaaatttaaataaaaaccgctgatagtgtatcagcggttttttttattaattataatatatgtaattattagttaattattggttttgtcgcgtatcttccgttcaagtaattctcctgtttcaggatgaaaataacgactgggccaaatttccgaaggcgctacacctagaaagtcagcaatgattttctcaccttttggccaagggcgtgacagtgcattagccagtgttgaagagcttaaaccagcttggcgagagatggctgccagtgttgtgcctcgttttctgagtgcggcaataatatcggcaggatgccaatcagatttccttgaaatcatttttaatcctttttctataaaattaaatgctgtgttagtggtataaataacagtttattagaaatgcttaaaagcattaaactgattatttagaaaataaaataacattatttttctaaaaatatttctgatttttttcttaataatttcttttttgaagttgataacaattttagagaaacgtaatgaaaaaagagtggtatacggcaatggaattgacgggtataggtggattacctaaatcaccacaaggtgtaaatgcaaaagctaaacgtgaatcttggttaaaacaaaagagaactaataaacaaggaaatggcgttgaatatcattactcttgtttaccagaagaaactttaattgctctggagctttatgaaccattagcacattacaaactaaataaagaggagccactcgttatctgggtgaaagcattccaacaacttaatgatggtgaacaaaaaacagtaacagagctgatcttgcgggatggtattagaagttttttagaaaagatcgtcaaagattaagcgactttaaagaacgcgctattgcgttatccgcaaccgatatctgactaacctcttagttgaatgtgagatgagatcatgaaaaaagaatggtatacagcaaaagaattagtagggcttgcagggttacctaattctccacaaggggtcaatttaatggcacgccgtgaaggatgggaaaatcgccgtaagcgtggagtacaaggtaaagccgttgagtactcggttaaaagcctccctgaagaggtggtgagtgtgttagcggcgcatgagcctcctgcagaatatttatctaagcgtcaggatgcctttcttatctgggtggaagcttattatcagctaacaaaatcagagcgtgaaaaaatcgtaaaatttgttttacgagaaggtctcgctaagttaattagctatattgatgctgacaatcaagaagagatcgaacgagaaaatgaagaagtggttcaaaaattaaaaagccccccagagtcgacatagtcgctctgacgggcttctcatactttatggggtttaggtatgaaaattacgattgtcgttgcacagcaacgtgcgcaaggccaattaatgcatctttgtaagatgaatcaggaataatcgctaacgcctcaatggctttatcggcttcttcttccgctttttggcgggtatattccagtgagccacactgtttcatcgtttttaacacagtgtcgagtaaatgacggccgttacctttttcaatggcttgacgaatgagttgtgattctgtttcgttaccatggtgcatggcatgaagtaaaggcaaagtaggtttaccttcatccagatcgtcaccggtatttttacctaattgggtattatctgcatcataatccagtaaatcgtcaatcagctggaatgcggtaccaagataacgaccataatcttggaaagctttctcttgctctggagtggctccgcagaggatggctgacgcatgagaggcagcttcaaataaacgggcggttttactgtagataacttgcatatagtcatcttcagtaatgtcaggatcgttacaattcattaattgtaatacttcaccttcagcgatcacattggttgcgctagacatcagctttagcacgcgcatggaatcaagatccgtcatcatctgaaaagatcgtgtataaataaagtcacctaccagcacgcttgcagcattaccaaacacagcattagctgtttgtttgcctctacgcatatcggattcatcaacaacatcgtcgtgcaataatgttgcggtatgaataaattcaattaaagcggcgacagagatatgtttgtccccttgataatccaaagctcggccggtcagaacagcgatcattgggcggatccttttaccaccaccgctaatgatgtagtaaccaagctggtttatcaaagaaacatctgaattaagctggtaaagaattgcgtcatttaccgcagccatatcagcggatgtgagttttataatagattctaaattcatgtttttcgactttggctcgccaatgagcgcgttataattaataaaaaatgatcatgccatagattttactctcttataatttagattgtactttaaaaatggctgaaataaatattgtgtaaaaaactcttttttttgctggttgtttgcgatctatacttgtcatcgcgactaaatttgcgtagaattcgcgccctatgtgaatattttaattgtgcactcaaattatacatattgggagtgtgcggaaagcggagtttatatgtacgcggttttccaaagtggtggtaaacaacaccgagtcagcgaaggtcaaacaattcgcttagaaaagcttgaagtagcaactggcgaaactattgagtttgacaccgtcatgatggtcgctgatggcgacaacattcaaattggcgctccaatccttgagggcgttaaagttaaagcggaagtggttgctcacggtcgcggcgagaaagttaaaattgttaagttccgtcgtcgtaaacacagccgtaaacaacagggccaccgtcagtggtttactgatgttaaaatcactggtatcgcttaaggtttaggagagcagattaatggcacacaaaaaggctggcggctcgactcgtaacggtcgcgattccgaagcaaaacgtctaggtgtaaaacgtttcggtggtgaagctgtattagcaggtagcatcatcgttcgtcaacgtggtactaagttccatgcaggtactaacgttggttgtggtcgtgaccacaccctgtttgcgttagctgacggaaaagttaaattcgaagttaaaggtccaaacaatcgtaaatttatcagcatcgaagctgaataattaccggtcctttaaacaccgagttaaaagccctgcacagtctgttgcggggctttttatatttaaaaaaggccatctctgggtaatttcggccatccagcacgttaatggctatcatacggagtaaaatcatgaaatttgttgatgaggccaagatcctaatcgtcgctggcgacggtggtaacggctgtgtaagctttcgtcgagaaaaatatatcccgaaagggggaccagacggtggtgatggcggtgatggtggtgatgtctacatggttgcagacgaaaacctcaacacccttatcgattaccgttttactaaatcttatcgcgctgagcgtggtgaaaatggccaaagccgtgattgtacgggaaaacgtggtcaagatattactattaatgtccctgtggggacgcgtgcccgtgatcttgctacaggtgagatcattgctgacttaacggtacatggtcaaaaacaaatggtcgctaaaggtggcttccatggtttagggaatacgcgttttaaatcatcagtcaatcgtgcaccacgtcaacgcacaatgggtacaccgggtgaatcacgtgaagtactgttagagctgatgctacttgcggatgtaggtatgttaggtatgccgaatgccggtaaatctacctttattcgagccgtctcggcagccaaaccaaaagtggcagattatccatttactacactagtacctagcttaggtgttgtgcgtatggacagccatcaaagctttgtcgttgcagatataccggggctgatcgaaggggctgctgatggcgcgggtcttgggatccagttcctgaaacatttagaacgttgccgtgtattattgcatttgatcgacatcgatcctattgatggttctgatcccgttgaaaatgccaaaatcattatttctgaattagaaaaatacagcgataaactggcacaaaaaccacgttggttagttttcaataaagtggatctgcttgatgccgatgaagcaaaacagaaagcacaagcgatagttgaagcgttgggttgggaaggtgattattatatgattgctgctatcaaccaagaaggggtgaaaaaactttgttgggatattatggaattcctgaaagtaaccccacgtgagcaagatattgctaccgctttagccgctgaagaaaaagttgattttatgtgggatgactaccataaagaacaacttgaaaatcctgaccttgaagacgatgacgaagattgggatgaagaagatgatgatggtgtagagtttatctaccaacgctaatctctctttttatcggtattgttgtctcggtatcgtatagacatacagatagcgagacataaaaaacgcctgaattttcaggcgtttttactttctaacaaataatagtgctatctattgttatagatatctttatataaattcgtttcaaaacgaaccaaataggcgcgtccagcattgcgattttgtgtaggcggagagtaggcagaaataaattgtacaaatgctactttctgtccattggctgtggtcataaagccagctagattatacactcccttgagtgaacctgttttagcggaaactttaccgttgacgcccgcttcagtaaaaccaccacgatattgcaatgtaccatcatgaccagcaagaggaagcatactgataaaatttaactcactatcatgttgtccgacatattgtaatacttgcatcatggttgcgggggctatcaggttatggcgggaaagcccagatccatccaccataattgtattagctaaatcaatgcccgctttttgttttaaaatagcacgagtggcatccgcccctgaacgccaagtgccagcaacaccataatattcacgaccaatagttctaaatacggcatctgcaatcatattgtcagactcttttaacatcgtcgtcaataaagtgtgtaacggtttagattgtgtttgtgctaaaacagtaacagaggctttaggttgggagcggcgtttgacataaccgtccagctcaatatctgcacgttgtaactcttcttttagcaatatacctgcccagtgcgcaccatcttgaatggaaaacatcagcggcatggcttcttcacgtttaggaatgcagcctgttatcacataagtatttaaatctctcaccgtgacgtctaattcgcaaaagcgggttcgtgttgagcctttttcataggtttcaacttcgcttaaaaccgtgacaggataaaaagacgctttacgtatggtggcgatatcaccttctttttgaccactttgcagtaagacggaaaaacaatttttatctacaatagcggcacttggtggggcactaaagcattgggtcatatcattccaaacccatcccggcgctttgtcatggctggagaaagcagaggtatcaattaataaatttcccgttatttttgtgacgccggattgttttaatacggcaaccattgctcgtaattgctggcgagttagcgtaggatcaccactaaaacggaaaattaaatcaccctctagttgattgttttttatcttaccttccgtttccattgtggtggtaaattgataatcgccccctaattgcaatagggcggctaaagctgtgaccactttttgtgtgctggctggcaaagataattgattatcattataagttaggttaggggaggatgcgccaacagtttgggtgattaaaccgacttgagtgccatcaggcaaaagttctatatatttttcaacaggaatggcgagggttgaaaagcttaacagactcaaggtataaaatattccgcggaatataggtaataagcgcataatttctctatccgtaactataagcttaacgctatagtgttgattgccagaggctaatactaaagggcaatgagggcaaaagtaaacggtaacacgtgtgattatctgattatcagaaaatattacttatcctgtttttaaaacgagaataagacgtgaagccattggcctcttgtgttagatttagtttagctttagataagggaggtttttactacttcccaaccaaaagggtagaaagttacaattattttctattcatcgaatatataaagggacaggccctcattaaggctgcctgtgtctttttttgtcttgagaagagtaaagtagaaccttttctctgtgttgttagtataaaaaatcaggatgatacctattttttattaggaatagtattgaggtattaacacatgaatcagatccctatgacagttctcggagcagaaaaattacgcgaagaactggaatatctaaaaagtgttcgtcgcccagaaattaccgcggccattgctgaggcacgggaacatggcgacttaaaagaaaacgcggaatatcacgcagctcgtgaacaacagggtttctgtgaaggccgcattcaagaaattgaagcaaaattatcaaatgcgcaagtcattgatatcactaaaatgacaaataatggacgtattatttttggtgccacggtgacgttactcaatgtggatactgaagaagagcaaaaataccgcattgttggtgatgatgaagcaaacattaaagaaaacttaatttcagtcaactcaccgattgcccgtggattgattggtaaagagttagatgatgtggtggtcattaacaccccaggcggccaagtagagtatgaagttttaaacgtagaatatatttaatttgtaattttacgtttctatagaaaactagaatgctatcctgtggtaatattaaaaaaggcctgaaaaggccttttttgccatagagttagttatggcatttttatataaaggtataagttttatttcggtaaaataattttacgcgcttcagaagggcgataaagaacaaccatttttccgataacttgtacattctgtgcaccgctttcacgtacaatcgctgccacgatcaagtttttaacatctcgatcttcgcctgcgattttgactttgataagctcatgatgtgccagagcgatttcaatttctgcaagaacgccttcagtcaacccgttgttaccgatcataacgacaggattgagatgatgagcgagccctttcaggtgttgaatttgttttttgttaagagtcatcattaatttttgcttagttgggattgaaaacggtctattctaacgccatctctcatttatcaccataaaatgtcgtcaagatgcggtaaaatgagtgaagaagtaaaatttttgattgctaagtgtatgatagttggaaaacgcaatggccaataaaaaacgttcggcaagctctagccgctggttacaagaacattttagtgataaatatgttcaacaagcaaagaaaaaagggtttcgctctcgagcttggtttaaattggaagaaattcagcaaagtgataacattttcaaaccaggtatgaccgttgtcgatttaggtgctgctccgggtgggtggtctcaatatgtcgtacagcagttaggaaataaaggtaggatcatcgcatgtgaccttttacctatggatcctatcgttggtgtcgatttccttcaaggcgattttcgtgatgaacttgtattgaaggcattgcttgatagagtaggtgataataaagtccaggttgtcatgtctgacatggctccaaacatgagcggaacacccgcggtcgatattcctcgatccatgtatttagtagagttagcgcttgatatgtgtcgtgatgtgctggctcccgggggaagttttattgtcaaagtgtttcagggagaaggctttgatgagtacctggggcaaatacgctccctgtttacgaaagtgaaagttcgtaaaccagacgcttcgcggtctcgttctcgtgaggtatatattgtagccacagggcgtaaactttagtaccctaaagctatttgttaacacagttgtaatatgaggttaatcccttgagtgacatggcgaaaaacctgatcctctggttagtcattgcagtcgtattgatgtcattattccagagcttcggacccagcgattcgaatagtcgtaaggtggattactctacctttatcaatgagttaactaataaccagttacgcgaggtcagcataagtggttatgatattaatgtaactaaaacagataactcaaagtacagcacgtatatgcctatgcgtgatgataacctgctgaccactttaatgaaccgtaatgtaaaagtgaccggtgaacccattgaaggtcaaagccttctaacacaaatttttgtgtcttggttcccaatgcttttactgattggtctttggatcttctttatgcgccaaatgcaaggtggtggcggtaaaggtgcgatgtcttttggtaagagtaaggctcgcatgttgacagaagaccaaatcaaaacaacctttgctgatgttgcaggttgtgatgaggccaaagaagaagtcagcgagctagttgagtatttacgtgatccgggtcgtttccagaaattaggtggtaaaattccgaaaggtatcctaatggttggtcctccgggtacgggtaaaacattattagcaaaagcgattgctggtgaagcaaaagtacctttctttactatttctggttctgacttcgttgaaatgtttgtcggggttggtgcttctcgtgttcgtgatatgtttgaacaggctaaaaaagcagcaccttgtatcatctttatcgatgaaatcgatgcggttggtcgtcaacgtggtgccggtcttggcggtggtcatgatgaacgtgaacaaacgctgaaccagatgctggtcgaaatggatggttttgaaggcaacgaaggtatcatcgtgattgccgcaactaaccgccctgacgtattagaccctgcattattacgtccaggtcgttttgaccgtcaagtcgtcgtaggtttaccagatgttcgtggtcgtgagcaaattctgaaagtgcatatgcgccgagtgccattatcaccagacgttgatcctgcgatccttgctcgtggtactccgggtttctccggtgctgacttggcaaacttggttaatgaagctgcactatttgctgcacgcggtaacaaacgtgttgtttcaatggtcgagttcgaaaaagcaaaagataagatcatgatgggtgctgaacgccgttcaatggttatgaccgaagaacaaaaagcatcaacggcttatcatgaagcgggacacgccattattggtcgtttagtgcctgaacatgatccggtacataaagtgacgattatcccgcgtggacgtgcattaggtgtgactttcttcttacctgaaggtgaccaaatcagtgccagccgtcaaaaactggaaagccaaatttcaacactttatggtggccgtttagcggaagagatcatttatgggcctgaacatgtttcgacaggggcttctaatgatatcaaagtggcaaccaatattgcacgtaacatggtgacacagtggggcttctctgaaaaattagggccattactgtatgctgatgaagacggtgaggtgttcttaggtcgttcagttgctaaagcgcaacatatgtcagatgaaacggcacgtactatcgacgaagaaattaaagctatcatcgatcgtaactatacccgtgctcgtcaaatcctgatggacaacctagatattctgcactcaatgaaagatgcattaatgacttatgaaaccattgatgcacctcaaattgatgacttaatgaatcgtcgtgaagttcgtccaccggcaggttgggaaggcaataatggcaatagtggtgcaaataccgctacagcacagccgacacaaacacatgtgacgaatgagccaaataataagtcaggatcagagagtgacacaccttctgataacaatactcattaatccttatcgggttctatattgagtaagctataaatacaaaccccaggctttctggggtttttttatataggtatcaacgaaatgaaattaattgccagaggaagagagcttaatttatcttcaccccaagtgatgggcattttaaatgtgacgccagattcattttctgatggcggaacgcataactctcttaatgatgctattaaccacgccgctaaacttattgctgaaggggcttctatcatcgatatcggtggtgaatcaacaaggccgggtgccagtgatgtttctgtcgatgaagaattacatcgtgttattcctgtggtcgaagctatccagcaacgttttgatgtgtggatttctgttgatacatccaaagcacaagtgatcacggagtccgctcaagcgggtgcctctattatcaatgatatacgttcacttaccgaacctggagcacttcaggcggctgcaaaaacggggttacctgtttgtattatgcatatgcaaggtttacctaaaacaatgcaacattcgccgcagtataagaatgtgatgatagaagttgatgcttttctggcagagaatattcaacgttgtattgatgctggtatcgagaaaaatcaaattattcttgatccaggcttcggctttggtaaaaatttagcgcataattatcaattattagcacatctaagtgattttcatcactttggtttaccgatactcgccggaatgtcacgtaaatcaatggtagggcagttactcaatgttccgccacaagagcgtgttgctggtagtgttgcttgcgcagttattgctgcaatgcaaggggcacaaattattcgtgtacacgatgttaaagagactgtagatgcgatgaaagtcgtgcaggcgactctttctgcaaaggaaaataatgaatgagcgaacgtaaatactttggaacagacggtatccgtggaaaagtaggtgacagccctattacacctgattttgtattaaagctaggctgggctgcaggtaaagtacttgcacgtcacggctcacgtaaaatcattatcggtaaagatactcgtatttctggttatatgttggaatcggctctagaagcaggccttgcagctgcgggattatccgcttcatttacaggcccgatgccaacccccgcggtcgcttatttaacccgtactttcagagcagaagctggcatagtgatttctgcttctcataatccctattatgataatggcatcaaattcttctccattgatggtacaaaactacctgatgaagtagaagaagctattgaagcggaaatggaaaaaccgatcacttgtgtagagtccgcagaattagggcgtgcgaatcgcattgttgatgccgcaggccgttatattgaattttgtaaaggtacgttccctaacgaaaataatttaaatgggttaaaagttgttgtggattgtgcccatggtgcaacttaccatattgcgcctaatgtttttcgtgaactcggggctgaggttatcactattggttgtgagcctacgggcatcaatatcaatgacgaatgtggtgcaacagatgtacgtatgttgcaaaaacgcgtgttagaagagggtgccgacgttggtttagcctttgatggtgatggtgaccgtattattatggttgatcataaaggcctaaaagtagatggtgaccaaattctctatatcattgcgcgagaagcattgcgtcaaggtcaactacgtggtggtgccgtcggtacactaatgagtaatatggggttagagattgccttaaaacagcttggtattccttttgtgagagccaaagtgggtgaccgctatgtacttgagaaattgcaagaaaaaggctggcgtttaggggcggaaaactcggggcatattattttacttgataagacaacaacgggtgatggtattgttgctggtctgcaagtattaagcgcaatggttcgtaaccatatgagcttgcatgatctatgcagtggcatgaaattattaccacaaattttggtgaatgttcgttttacgggaaatcacgatcctctacaatccacagaagttcagcaagtcgcaaaagaagtcgaggcggagcttggtggtaagggacgcgttttattacgtaaatcaggaacagaaccattaattcgagtgatggttgaaggcgaaaatgaagagcaagtcacagcgatggcgaatcgtattgctgatgcagtaaaacatgttggctaattgctgtttttttcttcaattaatcactttatagtaaaataaccttgcttgtcagttcaggtttggttagtattcacacccgcttagtaaggtcgttgaactaaagcgggtgaagcaatcgaaggttatcgcataggcgataagttccatagaataggtaacgcaaatgtatacagcactcattgttattcttatcattgcagcaacagggctggttggtctgatcctgttacagcagggtaaaggtgctgatatgggcgcttcttttggtgcaggtgcttccggtacagtatttggttcaagcggttcagcaaatttcatgacccgtatgaccgctgttttagcaacagtgtttattgtactttgccttattttaggtaatttaagtgccaataaaactgttcgtgaagacagtaagtggatgtctatcgagcagactgcagaagaagcgaaaaaagctgagcaattagcagcgcctgtagcaccagcaaacacagatattccgcagtaaactaagtaatagttaaaaatgagattgtttggggttttggttaaataaacagtctcattaaagtgccgaggtggtgaaattggtatacacgctaccttgaggtggtagtgcctacaaaacgggcgtacgggttcaagtcccgttctcggcaccattattccagatagcttgcgttttgcttgttatcagcgtaaaatttgccacgtttttcgaacgcggggtggagcagcttggtagctcgtcgggctcataacccgaaggtcgttggttcaaatccagcccccgcaaccacttctaacaatacagcacttttctcattaatcatcttgtaaaccgattatgatcctgagtggaatgtgccgtagaagaggttatctcgattggcaagttacagggtccagttgcataaagccccgaatttcggggttttttgttatcagagaatagaatactgggctataagccctttttttatgccttgggggtgggtttgtccacattagagcaaaaattaacagcgatggtttcagcaccagtagaagcattaggctttgaatttgttggtcttgagtttattcgtggtcgagtatcaacattgcgtatctatattgatagtgaagaaggtatcactgttgatgattgtgctgatgttagccaccaggtcagtgctgtgctggatgttgaagatccaattcaaacattttataaccttgagatctcatctcctggtttagaaagacctttattcactacaacgcattatgagcaatttatcggcgaagaagtcgccgttgtattacgaattgcgatgcaaaaccgccgtaaatggcagggcattattaagtctgtcgctggcgaaatgatcacggttactgtggatggtaaagacgaagtgttcgcactgagcaacatccagaaagctaacctggtaccccacttttaagttttgaagaggcaactaggatgaacaaagagattctggctgttgtggaagcggtctctaacgaaaaatctcttcctcgtgagaagattttcgaagcactggaaactgcattagcgacagcgactaagaaaaaatatgagcaagagattgatgtacgagtttgcattgatcgtaaaacgggggattttgatactttccgtcgttggcttgtggttgaagaagttactcagcctactcgtgaaatcacacttgaagcggctaaatacgaagagcctgaaattgaactaggcggcttcattgaagaccaaattgagtctgttactttcgaccgtattaccacccagaccgcaaaacaagtgatcgtacaaaaagtacgtgaagctgaaagagcgatggttgttgatcaattccgcgaacaattaggcgaaattatcacgggcgttgtgaaaaaagtaaaccgcgataacatcaccctagatttaggaaataacgcagaagccgttatcttacgtgaagatatgctaccgcgtgaaaatttccgcccaggtgaccgtgtacgtggtgtcttatacgatgttcgtacagaaactcgtggtgcacaacttttcgtaacacgttctcgtcctgaaatgctgatcgaattattccgcattgaagtacctgaaattggcgaagagatcattgagattaaagctgcagcacgtgatccaggttctcgtgccaaaatcgctgtaaaaaccaacgataaacgcatcgaccctgtgggtgcttgtgttggtatgcgtggtgcacgtgtacaagccgtttccagtgaactgggcggtgaacgaattgatattgttctgtgggatgataatcctgcacaattcgtgattaatgcaatggctccggcagatgttgcttctattgttgtcgatgaagacaaatgtacaatggacgtcgctgttgaaagcagtaatcttgcccaagcgattggccgtaatggtcaaaatgttcgcttagcagcacaattactgaaaaaacatcgtggtgatgacaaatgggaactgaatgtcatgactgcagatgaactgaatgctaagcatcaggcagaagcaaacgcagccattgaaatatttactaagcatctcgacattgatgaagacttcgcaactgttttagttgaagaaggtttctctacccttgaagagttagtttatgtgccgattgacgaactgttagctatcgacagtcttgatgaagaaacagttgaagcattacgtgaaagagcaaaagcggcattaacaacgattgaactagctcaaaaagaaagcctaggcgataaccagccagctgaggacttattagctctcgaaggcatggaacgttctttagcatttgatctagctgcccgtggtatctgcacactggaagatcttgccgaacagggtatcgacgacctaactgatattgacggtttaaatagtgagcgcgcaggcgaactcattatggctgctcgtaatatctgctggtttgggaatgatgcgtaacaactgagcaggaaggaacagaatgacagatgaaacagtaaaatcacttgcagaagagattcagacaccggttgaacgtttggtacagcagtttgctgatgccggtattaagaaaaccgtctctgattctgtctcccaaaaagagaaagaaaccttgctggcttggttgaaccgtgataaagagtcaaccagccaaccagaaaaattaacgttacagcgcaaagtgcgtagtacgttaagtgttcctggtacaggtggcaaaaataaatcagtagccatcgaagtccgcaaaaaacgcacttatgtgaaccgtgatgcagttgaaaaagcacaagcggcagagcaagctcagcgtgaagcggaagaaaaggcgcgtcgcgaagcagaagaaaaagcacagcgcgaagcacaagagaaagcacagcgcgaagctgaagaaaaagcaaaacgtgaagctgaagaagccaagaaaaaggctgaagaaaaggcaaaacgtgaagctgaagaagcaaaacgtgaagcagcggaattagctaagcgcgaagcagcggaaaaagacaaagtgaaacaaaacgagaaaccaaaagctgataaggctgatcaggaaaaagcacgtcgcatagccgaacaggctgaactgaaacgtaaaacagaagaagctcagcgtcgtaaagctgaagaagaagctcgcattgcagcagaaaaagcgcgtcgcttagcggaagaaaatgctgaaaaatggacttcagatacgtcatctgaaacagaaggtactgactatcatgtgacgacatctcgctatgcgcgtgatgcagaagatgaaagtgatgctgaggttgaaggtggccgtggccgtggtcgtgcagcaaaagcccctcgtccaaagaaaaataaccgtcactctgaaaaagcagatcgtgaagaagctcgcgctgctggccgttctaacaagaaaggcaaaggacgtaaaaacagcacattacagcaaggcttcaataagccagcagctgctgtaaaccgcgatgttgtcattggtgagactatttcagttgctgatttagcaaacaaaatggcagtgaaaggttctgaagtcattaaaacaatgatgaaaatgggtgcaatggcaaccatcaatcaagttttagaccaagaaacggcacaactggttgcggaagaaatgggtcacaaagttatcttacgtcgtgaaaacgagttagaagaacaagtgatgaacgaccgtgatactagcgatgaaatggctgtatctcgtgcgcctgtggtgactattatgggtcacgttgaccatggtaaaacctctttactcgactacattcgttcaacgaaagtggcttcaggtgaagcaggtggtattactcagcatatcggtgcttatcacgttaaaaccgacaaaggtgaaattaccttcctagatactccaggtcacgccgcatttacttcaatgcgtgcccgtggtgctcaggtaacggatatcgttgttctggttgttgctgctgatgatggtgtgatgccacaaactatcgaagctatccaacacgccaaagcagcaaatgtgcctgttgttgttgccgtgaacaaaattgataaaccagaagctgatcctgatcgtgttaaaactgagctgtctcaatatggcattctgccagaagattggggtggtgagactcagtttatccatgtgtcagcaaaacaaggcttaggtattgacgagttgctggatgctatcttattacaagcggaagttcttgaactgaaagcagtaaaagaaggtatggcaagcggtgttgttatcgaatcttacctcgataaaggccgtggtcctgttgcgactatccttgttcgtgaaggtactttgaataaaggtgatatcgttctgtgtggctttgaatacggtcgtattcgtgcaatgcgtaacgaattaggtaaagaagtacaatctgccggcccatcaatgcctgttgagattttaggtctgtctaatgtaccttctgcgggtgatgaagcaaccgttgttcgtgatgagaaaaaagcgcgtgaagttgccttatatcgtcaaggtaaattccgtgaagtgaaactggctcgtcaacagaaatctaaactggaaaacatgtttgctaacatggaagaaggtaaagtttctgaactgaacatcgtactgaaaacggatgttcaaggaacttgtgaagccatcactgatgcattagttaaactttctacagatgaagttaaactgaaaattatcggttctggcgtgggtggtatcactgaaacagatgcgactttagcggctgcttctgatgctatcattcttggtttcaacgttcgtgctgatgcttctgctcgtcgtattatcgaacaagaaagtgttgatttacgttactactccgttatctatagcttgattgatgaaattaaatcagcaatgagcggtatgttagagcctgaatacaaacaagaaatcatgggtcttgctgaggttcgtgatgtgtttaaatcacctaaattcggcgctatcgcgggttgtatggtggttgaaggtaatatcaaacgtaacaatcctattcgcgtattacgtgataacgtggttatttacgaaggtgagcttgaatcactgcgtcgctttaaagatgacgtcaacgaagtccgtaatggtatggaatgtggtatcggtgtgaaaaactacaacgatgtccgtgttggcgatatgattgaagtgttccaagttatcgaaattaaacgttctatcgattaatcgagtacgtctgatttaaaaaggaagggagcttaatggctcccttcttattcctctctttatgctattccccctttattcttttctgtatttttcaatataagcgaaatagattggctttcagtaatttatgtcattaaaagaacagggtaagataacgctaaagagcagatttattgctaaagagaaaaaaagcgtaaagcggttgtgaaacgtgactttatgtatactctttagatatcatcgattttaaaattggatcaataatgacaatagagtgataacgacattgtcagggagagataaaatggcaagagattttagccgtgctcagcgtgtttctcaggaaatgcaaaaagaaatcgccatcattttacagcgcgaagtaaaagatccacgtattggaatggccaccgtatccggtgttgaaatttcacgtgatctggcttacgccaaagtatttgtcacctttttaaacctatcagcaggtgaagaaagcgatgaagaaatggtagaaaatggcttaaaagcccttaacgaagcagcaggctttattcgctctttattaggtaaagcgatgcgcttacgtgttgttcctgagctaacatttgcttatgacaattcattagttgaaggtatgcgtatgtctaaccttgtgtcaaatgttgtcaaagatgatgaaaaacgccgtcataaagaggaagagtaatggggcgtcgtcgtaaagggcgtgagattaacggcgtattattgcttgataagcctcaagatatttcatcgaatgacgctttgcaaaaagtacgccgcatgtttaatgcaagtaaagcggggcataccggcgctttagatcctttagcgacaggtatgcttcctatctgtttaggtgaagcgacaaagttttcacagtttttattggattcagataaacgctatcgagtgattgccaaattaggtgaaagaacagatacctctgatgctcatggacaagtgatccagcaacgacctgtacagtttaaccagcaagcgctcgatgctgcgttagagagttttcgtggtgaaacattgcaaattccttcaatgtattcagcccttaagcatcaaggtaaaccactttatgaatatgcaagacaaggtattgaagttgagcgagaagcaagacccattaccgtgtatgaattgcaatttattcgctgggaagacgatgaattagaactagaaattcattgttctaaaggtacttatattcgcactatcattgatgatctgggtgagaaattaaactgtggtgcccatgtgattttcttacgtcgtttagaagtcgcagattatccgaaagagcgtatggtgacgcttgagcaattgcgcgcaatcattgatgatgctcagcaacaagatgagtcaccatttcctgtgttagatgccttattattgcctatggatactgcggttgcacatttccctgtggtgcatttaaccgccattatggcgggttacttaaaactggggcaaccggttcgggtaaatcacaccttggatgaaggggaatgggtcagagtcaccgaaggcgatgagaaaaaatttattggccttgcgatcatcaaagatggtctagttgcaccgaaaagattagtcgtggattatcacgcactcaataaccctgaatagcaattcttgcgctaagtgtgtttgaagcgtagaataatgcggctatctgtttaggtggctgagttggatagctgaattagagattggctatctgaaaattttacttttattggagttttattatgtctctaagtactgaagcgaaagcaaagatcgttgctgaattcggtcgtgatgctaacgatactggctcaagcgaagttcagatcgcactgctgactgcagaaatcaaccacctgcaaggtcacttttcagagcacaaaaaagatcaccacagccgtcgtggtctgctgcgtaaagtttccagccgtcgtaatctgctggactacctgaaacgtaaagatgtagctcgttatactgcactgattgaacgtttaggtctgcgtcgctaatcaagtgagtttcagtgaaaaggggcccgtaggccccttttctactagaaagtgctatttttaagaaagtgctatttcaaaaatgagtcgttatgttttaatgtggtgatggttatttagtctctctagttgcgacaattcgcgcggctaatgaaagtgtttaaacgtggttaagttaaatatttccattagtcgcgaggggacgtagcggagaaaagattattcatcgtcgctaaatatcatgcgacaataagataaaggatattattttgctgaatcctacagttcgtaaatttcaatacggtcaacataccgttacgttagaaacgggcatgatggctcgccaagcaacggctgctgtaatggttgacatggacggcactgctgtttttgttaccgttgttgctaagaaaaaagtgaaagaaggacaagacttcttcccactcaccgttaactatcaagagcgttcatacgcagctggccgtattccaggaagtttcttccgtcgtgaaggtcgtcctggcgaaggtgaaactttaatcgcgcgtcttattgaccgccctttacgcccactattcccagaagggttcttaaacgaaatccaagtagttgcgactgtggtttctgttaatccacaagttaacccagatatcgttgctatgattggtgcttctgcagcactgtcattatcaggtgtacctttcaatggtcctatcggtggtgctcgtgttggctttattgatggtcaatatgtactgaacccaaccgttgatgaactgaaaattagtaaattagacttagtggttgcaggtactgcgggtgcggtactgatggttgaatcagaagctgatttattatcagaagaacaaatgttaggtgcagtggtatttggtcatgaacaacaacaagttgtgattgaaaatatcaatgcattagttgccgaagtcggtaaagaaaaatgggattgggcaccagagcctattaaccaatctttacatgatcgtattgctcaattagcacaaactcgtattggtgatgcgtatcgtattactgaaaaacaagagcgttatgagcaaatcgatgctattcgtgatgaagtgatcagcacattattagcagaagatgagtctttagacgaaggcgaaatcattgaaattttctctggtttagagaagaaaattgttcgtgctcgtgtattagcgggtgaacctcgtatcgatggtcgtgaaaaagacatggtacgtgctttagatattcgtacaggtttattaccacgtacacatggctctgcgctatttactcgtggcgaaacgcaagcattagtaacagctactttaggtactgcacgtgatgcacaaaccattgatgacatcatgggtgagcataccgataccttcttactgcactacaacttccctccatattctgtcggtgaaacaggtatgatgggttcgccaaaacgtcgtgagattggtcatggtcgtttagcaaaacgtggtgtattagccgttatgccaacgattgaagaattcccatacacagtacgtgtagtgtctgaaattacagaatccaatggttcatcttcaatggcatctgtttgtggtgcttctttagcactgatggatgcgggtgtaccaattaaagaatctgttgctggtattgcaatgggtctggtaaaagaaggtgaaaacttcgttgttctttctgatattttaggtgatgaagaccatttaggtgatatggactttaaagttgcgggtagccgtaacggagtcagtgcattacaaatggatatcaaaatcgaaggtatcactcgtgaaattatgcaagttgcgttaaatcaagcgaaaagcgcacgtctgcatattttaggggtaatggaaagtgcaattagccagcctcgtgcagaaatttctgagtttgcaccacgtattcacactatcaaaatcaatgctgataagatcaaagatgttatcggtaagggtggttcagttatccgtgcattaacggaagaaacggggaccactatcgaaatcgaagatgatggcacagtgaaaattgcggctactagtggcgaacaagcaaaacaagctatcgctcgtatcgaagagatcacggcagaagtcgaagttggccgtatctataacggtaaagtaacacgtatcgttgatttcggtgcatttgttgctatcggtggtggtaaagaaggtctggtgcatatttctcaaatcgcagacaaacgcgttgagaaagtaagtgattacctgactatgggtcaagaagttccagtgaaagtactggaaattgaccgccaaggccgtatccgcttaagcatgaaagaggctcaagcaacccagcaggaagcagctgaaacttcttctgaagatcctgcaaattaatgatattctactaccgatatctagacataggtatcggtagagacttattatgattgacaagtaggacgtcataaaacgctttttgttgaaagagtctgactttgggagtgagaaatgaaaacatttctgcgcggttgttctattgctgttttcatctttatttccgggtgcagcactagtccagaatggcgtaagaatgctatttttgctactccactacagccttctttacaacaagaagtgatattggctcgtatagaacaaattctggcgagccgttcattaaccgaagatgaatatgcacagcttttatatgagcgtggtgtgctgtatgatagtctcggtttaagagcattggcgcgcaatgatttttcaatggcgttgtcaatgagaccagatatgctagaaatttttaattttctaggtatctattttacgcaagcagcgaattatgatgctgcttatgaagcgtttgattctgttttagagcttgatccaacttacaataatgcgcgttttaatcgtggtatcgctttatactatggtggccgattgaaattggcgcaggatgatctgcaggcgttttatcaggtcgatccaaatgatcccattcgttcgctttggttatatcttgttgaaaaagagatagactctgattctgctaaaaaacagctgaaacagcgatacctacaggcgaataaaacgggacaatggggatggaatatagttgagttttatttaggtgacattagtgaaaaaacattaatggaaaggctaaatgaaacgtcaaccgataacacttcgctcgctgagcatcttagtgaaactaacttctatttaggtaaatattacctaagtctgggggacatggatagcgctgaagcgttattcaagctgacggttgccaacaacgcacataactttgttgagcaccgctacgcattgttggaattagcactgttaggccaacaagaagacctagcggaatcggaccagcaatagctgacgaacatttctttgatcagtttgaaagccatcatctgcataggatgagggcttgtttgttcgtttaataatataatttgagccagttcacattttagatgataaagaccgacaaaccatgcggtatgttatgtcaactggccgccataatgaatgaggcacagtgacatgactactgaaaccgatatgacttttgctgatctaggtttatcagcacctattttgactgcactgaatgatttaggctacgagaagccttctccaattcagcaacaatgtattcctttccttttagatggcaatgatgttctaggtatggcacaaaccggtagtggtaaaaccgctgcgtttagcttaccgttattacacaatctagatgaatcattaaaagcaccacaaattttagtgttagcaccaacccgtgaacttgcggttcaggttgccgaagccattgaagatttttctaaacatttaccaaaagtgaatgtcgttgctctgtatggcggccaacgctatgacgttcaactacgtgcattacgccaagggccacaagttgttgtgggtacaccgggtcgtttattagatcacttaaaccgtggcaccttagatttatctaaactaaaaggtttagtattagatgaagctgatgaaatgttacgtatgggctttattgaagatgttgagaatatcttaagtaagatcccagcagagcaccagaccgcattattctctgcgacgatgccagaagctatccgtcgtattacacgtcgctttatgaatgatccaaaagaagtacgtattcaaagcagtgtaactacacgcccagatattagccaaagctattggatgacttatggtgcacgtaaaaatgaagcattaatccgtttcttagaagcagaagatttcgatgcagctattattttcgttcgtacaaaaaatgcgaccttagaagtagcagaaaccttagagcgtaatggctataacagtgcggcattgaatggtgacatgaatcagtctctgcgtgagcaaacattagagcgtctgaaaaacggccgtttagatatccttatcgcaacggatgttgctgcgcgtggtctggatgttgaccgtatcagcttggttgtcaactatgatatccctatggattcagagtcttatgtacaccgtattggacgtactggccgtgctggtcgtgcgggtcgtgcaattctatttgttgataatcgtgagcgccgtttactgcgcaatatcgagcgcacgatgaagatgtctattcctgaagttgaattaccaaacgcagagctgattagtcagcgtcgtcaggaaaaatttgctcagcaaatcgctcaacagttagaaacaagtaaccttgaccaatatcgtgcattgttaccaaaattagcgccacaaggtgaagaagcgttagatatggaaacattggcggcggtattactgaaaatggctcaaggtgagcgtgcacttattctgccacctgatccagtacgtcgtcctcgtcgtgaatttaacgatcgtgacgatcgccgtaacgatcgcgaacgttctccacgtcgtgagcgccgtgatgcgggtgaaatggatctttatcgtattgaagtgggtcgtgatgatggggttgaggttcgtcatattgttggtgctattgccaacgaaggcgatatcagtagccgttatattggtaatatcaaattatatggctctcactcaaccattgagttaccaaaagggatgccaggcgatttattaagccacttcactcgtactcgcattatgaataaaccattgaatatgcagttagtgggtgatgcacaaccttaccgtgagcgccgtaatagcagccgtcgtgatggtcagccacaaggtggtcgtcgctttagtaaaggcgatcaaccaccacgccgtggtaatggcgagcgtggtaacttccgtggtcgcggtaataacgaaaacgcaccacgtcgccgtagtagctctcataatcaataagaaacttaaagtttattcaattttaagctgaattgataaaaaccagtccatacaatggactggtttttttatagtatgctgagcgtggtgtttggcgccttatatgcagccgtaagtagggtgctgttagaggacgacaggagtgatcccatctcctactagacaataagtaaatcttattattatttcttacttaaatttcttaaatgcttataaattgttgctgagcttatgcctaattcggcggatactattttatgtgttgctgaaaattcaaaaagtccactttcatttaattctttaattatctctaagttcttgtatttacttggaatatttttatttccataaactctctttttaattggttctagatgattctgtacaagattattcacatcttgtgaaaaattttcatgttttaaattatttgtatcagtaaaactatctattaatgcatttaatggcatatcgagagcaaagttcatacaaatcataccaataggtgtacctgcattatttacaattaaagtagatgatgatttaaatggccgaacactttttgtattgaaataaacctcccacatttgatctgttcgattaaattttgagagtttttctaaagcaatatttgttacgggggcacctaatccacgaccagtaacatgtccattaactatgtggataacggaatggcgtaaatcctcaaaactatgtagcactatttcacaataatcaccgagaaattgccccaaattatcgagaaaaggaatataagagcggagtagatgccgatcttcttcagtaatcttttggtttgtaggaaggtccataagaaattttacccataattacagttaaataattctaacgttaaaagttgtcgaaatccatatttagtatactcggataatactgagtaaaatatttttatactaagttaagttttatgatcctaagcacatactttattttcttaatatggctaaatacgggtataggaattcgaggaagaaattatgaaactaggtattgaaacagagtcctatcacctattttttcagcagggtgtaatggatgtttttgattttataaataaagcaactgaattagggctggatggggtcgaattaaatatcattcctgatgaaggattacacccagaatttggtgtgttaacaagtgatagccctgaatatttagcaaaagtacgtcaggcaattgaagataaaaatctttattgtgaattagatacacgttttacaacaccaaaggcattaacaaaagcaattgatatcgctcgaggaattggtgctgatgtgatacgtacttatatgtttcgtcgaggacaatacaatccgaaacaataccctaaaattattcaagatattaagtctattgttccattattaaaaaaatatcgtatacgtcttgcaatagaaaatcatgaagatgaaacggctgatgaaatcttaaatattgtaaaagatattgattctatttgggttggtgcacattgtgatattggtaatggcatgatggcgtgggaagatcctatagtaacagtgagcaaattagcaccttatacatatagcactcattttaaagatcatattgttacacatgatgatgaaacactggtaattacaggaatgcctcttggtgaagggagtattgatatcgatgaatgttttcgtttattagttgaacattcgcctgtaacacgtattaacttagaaaactgttttccctatacatctcattttgctagagataaaggaacggggggagtatttgaattaagtggaagctttgaagttaaatcaccaccttttgatacgcaattaattaaccccttggaatattattatccagctaaaatttctcctgttgcattaaaaacattaatggacgcacaagagcgttgtgtacaagtttctgttaataaattaaaagaactaagaaaaaaatattgttattaatatataaaaatagttatcaaatattggagtgatctcatgattattaatactacatcagcaccagaagctattggtccttattcacaagcaattaaagttgaaaatcatatttatatttcaggttgttgcccattcaatactcatgatggttctgttatgggaaatgatattgaaacacaaacattaaaagctatgaataatttaaaagctattatagaagctgccggtgcatcaatggatgatattgttaaaacgacttgttttattaaagatataaaagattttcctatttttaataatatttattcttctttttttacatcaggaaaatacccagctcgttcatgtgtggaagtttctcgtctacctaaagatgttttaattgaaatagaagctatcgcttataaaaaataggaaatatgatcatgaataaatggggaaaattatgttttcttattttgggtggtgggactatattcaaactatccagcatgaaagatgtattttatgtgccaatgcaacaagattggggattatctaacacccaaattggttttggctttactatttatgccattattcaaacaatcggattattttcatcattgtatattgccgatcgcttctctaagaaaattttattaccagcgggcttaattggggtaggtttatgtggtgcttatttaagcacactgcctccttttacgggttatttaattgcatttggtgcaatggcatttttcggtgaggttgtttattggcctgttttactaaaatcggtacgtttattaggaaataaagaagaacaaggacgtatgtttggttttctagaagctgggcgaggggttgttgatgttctagtagcttcgggagctctttatatatttgttttatttggtgaaggtaaaacaggtatgcaagcaggattaatttattatacgcttgctacaataatagtaggtataattacatattttattgtggataatgacgataagaaggaaacctcctcagcaagtgaagctaatcgccaagttttggaagggattaaaaatgtcgtaaaatgtcctaacttatggttagcatcaatgagtatcttctttgtttattctgcttactgtgggttaacttattttattccttttttaaaagatatttacgcactaccaatagcccttatcggtgcctatggcattattaatcaatatgcactaaaaatgataggtggtccattaggcggatttttagctgacaaagttgcaaaatcgccaacaatatatctgaaatggacatttttattatctgcgattgcaatggctattttcattatgttgcctcatgactcaatgaatgtctatttaggtatgactgcaacattaggtttcggtgcaatcattttctcgcaaagagctattttctttgcaccaatggatgaaattggaacaccaagacaatatgcaggttcagcgatggcgtttgggtgtattattggttatatgccttccatgtttgcttatgctctctatgggtcattattagataattttgagggcattcaaggatataactatgtatttagtattatggtcacttttagtttgcttggttttatttgtgcaaccatattagctaagcgtattaaaatgataaataacactttaaatatagcttaaaaatagacaccgcttaattgtgatctagcaaacactgcttcatcgattggcattagctaaatacggctatacctagtacaaggaatgcactttaagcgttcttctggtggcgataataaatcaatattttgtttattgccttggcgtaaacgacttaatgttttggctaaacgctcttgctctaatggattaagcaaattgttcaggtaaatggtgagcgagggcggtaataacgaaaatgtaccacgtcgccgtagtagcactcataatcaataagaatataattcactcagtattcaattgagttgatgatataaattgaaaaaccagtcaacaaaaattggctggttttttctatataaagtagaaataaataattactcaattgggtacattttattggcatattccaagagtgcattaatttctatattgatggtaagggattagacaaatggttggggtttgatcggcaaacggattggcggtttttagattttgattttgatatttttattgttgataaagataactttcctaattacaatcgtaataaaataatttacagtaaagccgaacaatatttaggtattaaacctgtttatagtcaattagagaataatcgattagtgctttatcgttgccattgtggtagtgattattgttctgtgatttcttgtactttagatattacagaacattaggtgaaatggaataatattgcatataaggatggattagatagagaggaggctttagatttggataagcatggaataacacctattaaacaatttatattttctagaaaacaatatcagcaggtttttaataagtatttagacacttatttgtaaatggttaaatactgattttatgtagggttatgatttattgattaattcaatcacctctgcatccataagtggtgtgagttttgcactaataacgatttttttgtatttgttattcaacccaccggcaatgacttcattgaataatcgaatttctacttgggataatccatcttcggtacgttctaaaggatgaattaccacatttctttttcgacaaaaaaaggataatgggttaatacctatttgagtaagtgctgttcgtatcgcttcaatagcagggtaaaaatcaccaattaacattcggctatgagtaaaatgacgttctacagaaaattcttttttggtgtgaagatcacgaacttcgatgcgattaatataaactttaatataaatgggttccatcaagcttattcctttttactgattaaattaagccaatcgcttcttttaagggtttaaggtaacgtcgactgaccggaatttgtttattattatgtaaaataagttctgcttgtccattatcaccaaaaacaatttcattgacataatccatattcactaaatattgacgatggcaacgtaccagcggagtgcgtgtttctaaagtacgtaatgtaagctcagtaaaaccttcttgcccttgattattggtgacatagacaccgcttaatcgtgatgtagcaaacacggcttcatcgattggcattagccaaatacggctatgcccagtacaaggaatgcactttaagcgttcttctggtggtgataataaatcaatattttgtttattgccttggcgtaaacgacttaatgttttggctaaacgctcttgctctaatggtttgagcaaataatcaaaagcgtgctcttcgaatgcttgaatagcatattcttcaaatgccgttaaaaagacaatataagggcgatgttcaggatcaagcattgagaccatttctaagccagtaatacgtggcatttgaatatcaagaaaaaccacatcaggttttttacgatgtatttcccctatcgcctcaatagcattactgcattcaccaataatatgaatatctttttcttcttcgagtaaacaacgtaaattttcacgagcaagcggctcatcatcaacgattaatatattcattgttatgctgcgttatccatatttttttctaagggtaaacagatttttattttggtatagttatcaggctgacactccacaagtacaccatatagatcaccatagcgtaatttaatccgcttatcgacaagtctcattcctaaaccgagctgatgtgatgcgccttgcgaatgataaagccctgcattatcactaatttcgatcactattaagtggtcttcttgatgcgctctaattgtaatctttccgatgcctaataactgtgatgttccatgtttaattgcattctcaaccataggctgaagcgaaaatgcaggaaggcgcgcagtggctaaatgttcaggtatctgaatatctatctgtaaactttcttgaaagcgcgctttttcaatttgtaaataagccgtgacgtgttcaatttcatcactgagtgtcactatcgcttcgggtctttttaaattcttacggaaaaaagccgacagaaattgcactaactgttttgcttgatcactatcacgacgaataacggcttgtaatgtatttaatgcattaaataaaaagtggggattgacttgtgcgtgtagtaatttaatttctgattctaatagtgattgtttatttctttcgtattgcccggcaagaatttgtgctgataatagactggcgatcccttctcctaaggttctattaatggagctaaataagcgattctttgcttcatagagctttatggtgccaataacgcgattattttctcctcgtaaaggaataaccagtgtcgagcctaatttacaatgtggagaaagggtacatcgataaggtgtctcattgccgtccgcatacacgacttcgttattattaatggcttgtttagattgttctgaggaaatcggtgtacccggcaaatgatgatcagcgccaataccaataaaagcgagtagtttatctctatccgtaatggcgacagcactgacttttaattcttggtagataacttttgcaacacgagtactattatcttggttaaagcctttacgtaaaataccttcagtgcaaaccgcaatttttaatgcttgagcggagaaagcactggtatatttttcaaaaatggcacgtctatcttgtaatatcctaataaacatcgcagcacctattgtatttgctacaatcataggagcggcaatattttttactaaagaaagtgcttcatcaaaaggacgagcgagtaataaaataatactcatctgtattatttcggcaaaaaaggtgacggtagccgctgtccaaggattaaatatgcggtgcatttgtccatgttttacataataacgatgaactaatccaccaattaatccttctgcgatagtggataccatacaacttaacgctgtcatcccgccgagggaatagcggtgtaagccacccgtgaagccaacgagaaagcctacatacgggccacctaataatccgcctaatacggagccaatagcacgggtattagcaatagagtcattaatatgcaatccaaaataggtgcccataatgcagaaaatggagaaaatcacatagcacattaatttatgtggaagtttgatagtcacttgtaaaagaggcgtaaatagcggcgttttgctgagaaaccacgcaataatgagataaacgcacatttgctgtaataacagcaaaattaaatcaaattcgtacataagttgtgtgtaccattttctgtgtttatttaataaattaaaaaaacgtagataaaatgaggctattcgtggagtaataaaatttggtataagaataacttaatcgtactatcaaagaaaatcttcctctgagtcagtgatctagcgcacaaaattcttaaagaaatagtcagttattgtgtaagataacgctatcagtgagtgttctacttcactattaaggtctaatcgttatatgaaaaaaagagccatctatcttattttattaatgctaatacttattgcattagccgttcttttccgcgcgcataatcaatatttattactgcaaggtgaagtggatgcacctgaagttattgtggcctctaaagccaaaggacgtgttatagagcgtcatattgagcggggtgatgatgttaaagcggggcaattgatgatcaccttagatagcccagaactcaatgctcaagtggctgcactggaagcggcaaaagcccaagctcaagctcaattagatctctctattcacggtacaagagaagaaagcattcgcaatttacaagcgatcttatctcaggcgcaagcacaagccaccaatgcaacgaaagattatcagcgtcttagtgcggtcgccaataaaggttatgtctctgccaatgagcttgatagtgctcgtagtcgtcgagatgttgccgtgcagcaagccaaagcagcacaagctgaattagatgaagcgaaaaatggtgatcgtattgaattacgtgagaaataccgagccgcactacaacaagcagagcagcaattaattgagctgaaagttcagcaacaagatttacaggtaaaagctccggttgacggcgaagtggggcctattcctgcggaagtgggtgagctttttaatgccaatagcccattagctacattaattcgtctccctgaagcctattttgtatataacttgcgtgaagatattttagccgatatccgcaaaggcgatcgcatcaccatcactgttcctgcgttaggcaataaagaagtggaagcagaagttcgctatattgctcctatgggagattacgcaacgaaaagagcgacgcgtgcaacaggagatttcgacttaaaaacctttgaagttcgactgtatccaacggcacaaattgaaggactacgtcctggtatgagcgcattatggcgttgggataagtaagggcgaataatgagagtaaaggcagcttggcgtggttttaatagcgcattctcacgagaaacccatatggcagtgcgaagcccagtgttccactggctaagctggctgtttccattaatgttattcacattaattagtgctaacttttcagaaggtactttgctgaacttgccagtttccgttatcaataatgataatagtccactatcaaaaacgttgatccgagatttaaatgcaggctctcatgcaaaattaagtgcactagatacaaatccgcgaaccgccttagagcagctaggaagtgcaaaagattacgctattttaatgatcccccgccattttgaaaaagatgtattagcaggcaaacagccgacaacccgaatgtattacaatgggttgtattatgctgcgggtagctatgctatacaggattttagcgggttaattgccgagcttaatgctcaatatcgcactgttttagcgcaagagatgaataagccagtgccgcctttagccaaagtaacactctcttatgacagcctgtttaatgctagtggtagttatatctactatcaacaatttgctgcaaccattcatatgctgcaactctttgttgtcacctgcacgatttactccttatcacggggtaatatgctattaaacctaaaacctttcacttttgccctaataggtaaattagcaccttatacgctgtttttcttaacattattaatggttgaattagcggcgttagtgcatttttcaggggcaaaagtcaatggtaatccgctttatatgatattggtggggttcttttatatcatcgcggcacaaagtattgggttgctgttgtttacatttaccaatagtgcgataaccgcatacagtatgataggtatgctagtgagtatcgccttagctttttcagggatggcggtgcctgaactgtcgatgatattacctgctcgaatcatttctaatctagagccgttaacgcacgccttaaatgctatgtttgatatcttcttaagggaagtttcgttacaaggtattctttatgtgtgcacgcttttgttgatttatccttttgcgattgcgcttttagttcgcaaacgcatctttaaaagattggaattacaggtaggtgtcgtatgatgcagatgtatttccaaacatttaagcgtgttttattaggcatgttagaaaaaccgatgtggatgttattattggtttctctttgcattatgagtttagtctacgctaaacctgtattgtgggatctgcctgtggcggtgatcaatcaagatcatagccccgccagttatgcccttatccgctcattagatgccacacctaaattaagcttaaagggatatgataatttagatgaagctcgtcatgacatgatcatgcgtgaactgtttgccattattatcattccaacagattttgaaaaaaaactgcttaatggcaaaaatgttaccgttcctgtgtatggagatgcgaccaaccgccttgctagtggacaaattcagcaagaattaatgcaggcgtatcagcaattattagataactataacggccgtatcttacaaaatgcgggttttagtgcgacacagtcaaaaatattattaaaaccgatccaaagtgaaactatcgccatgtataaccctggggtcagttttgccgccattattttcccaggcttgttagtgatgttattgcaacactcattattaattgcttgtgtacgagtgagtatcgccgtcagaggaacgccaaaagggaagcctccgttagcggtatatttaggcgcgctatctgcacttataccgatttggctctttttatcttcggtgttctttgcactatggccgtgggtattaggctatcgtcaagaagcaccactttatcaaatttggatgttgaccttcccattcttattagcggtattaggattaggtaagttgatcaccgaatgcttgcgcagtgttgagatgatttacttaacattggcatttgtgacgacaccagtattctatatttcgggaactatttggccattacaagctatgccggattgggtattggcaatatcctctgcattaccttctacatgggctgtaaatgctatggccggaattaaccagatgggattatcattccaaagcatcctaggggatatcgtgatgatgctggttttaggcgtgatatataccattttgggggtgttagtgggtatgttgcgcaatggtgagttaaggaaaattactcatcaatttaagcattgggcgagacattaccaccgttcaaagtaaataatatctgtaatatgctaggtaaataggacgggattactgaaaagttatcccgtcttttttattttagtgtaaattttctataatagtctattaataacaaaaatttgtttaaattattttacttttatgcaatctctatctaaagatattatcttaataataataatgtttttaataagcttaaataattaatgttattgctataataattgatgtgaactattttaagtgcttttccttatcttaatatataaaaaataaattgattactttttatataaacataaaaaacaaataattatataaaaactagtaatgacacttaattaaaataaaccaatcttattgtaataaatttaatttagaagggctaaataaaataatcaaaataaaacattcaattaaagtaagaataaaaatttaaaaaaattaattgttaaattttaattaagtattattatattgatgtcaatttaatttcttagtaacgtttatcttattatctaaataagataaaagtctatgaaaaatcgtaattaaatgtgtttattattttctaggaattaaggtaatttatatgaaacttaattatttgaaactttttgtgatctctgcattatctgtaggttctgtttttgctgtttcagctgaagatcctgtaggaaatggacctgtaaccgtgaatggtggcgaaatattttttaaaggtgaattagtaaatgcagcatgtgctgttgactcttcatctgatggccaaatagttaaattaggtcaagtgagaactgcaaaattagcgaaagctggtgattttagcgaaaatactaattttactatccaattaaatgattgtgactctaaagtagctagtactgcaaaagttgcttttacaggggtttctgctgcaggacaagatgacgtattagcagtatcttcttcttctgctggtggtgctaaaaatgtcggtattcaaattttagatagtaagagtgcaccaatgtcttttgacggcgctggattcggtaatgcaactaaattacatgatggaaaaaatattattccattccaagcaagatattatgctttaggtgcaactgaacctggtatcgcaaacgcgaacgcaacctttgctgtccaatacgaataatatatagccttatactattttttagtataaggcttttttacttttttgtgggttattttaataagacatacaccaagattagctatagtggattataaaaatgaatagtattctaactttttctaaaataaagcttctttttttaatgctcttaactctatgtgtcattaaccaagcatatgctgctgtatcattaggggcaactagagtcatttattttgcaggtgaaaagcaagtaaaattaccagtaattaataatgatgaaaaacgttatttaatacagtcttggatagaaaatagcgaaggaaagaaagataactcttttgttattacgcctcctctattttctatgcagggtaaaaaagagaatactttaagaattatagatgcaactaacaataaattaccgaaagatagagaaactttattttggttgagtgtaaaatctatccccgctgtagaaaaatcacttgctaatgagaatatgttacaacttgcgattattagtaaaataaaattcttttatagaccaaaagatctcaccatatctccagatgaaaattataaaaaactacaatttaaacgtaataatgacacacttattataaaaaatccgacaccttattttattacgatgactgaattagaacttggtggtaaaaaattagagaacactatggttccaccttttgaagataagtctatctctattccaacatcagcttatgggaaactctcgtttcaaactattaatgattatggtgccatcacaccaaaaacaatcgtcgacgttagataatcattatttaatattgtagaattgaaagagtgatattatgtcattttcaacaggtataaatagcttaagcggcataaaaataaataacgtaaaattatttatttttatacttgcgctactattttcagttgactcaaagtctgaggaggagttttattataacccctatttcttatcagataacccggagtctgtcgctgatctatcttcttttgagaaaggattagaagtacctgaaggtaattatctggttgatatttacttaaatgacatattcttaaaaacccaatatatcaattttattgagaataaagggcagctatcaccatgtatcacaaaagcagagctaaaaagttggaatgttaatttaaatctcataacggatgaacaaaataaagataaaaataatgttgaacagaaaaatgagctcgatgaacattgtcagtcacttacttcattaatttctcaagccacagcaaattttgatgttggttcacaaaagctcaatctcactatacctcaagtatatttagtcaatcagtctcgaggctttattccaccagagttatgggatgatggtattgtggctggatttattacctatattttaaatgggagtaaaactcgcaacgatggtagcccagatactcattttactcatctcaatttacaaagtgggatcaatcttgggccatggcgtcttcgtgataactctatttattcttatgattctattaataaatcaagttggaaacatctgaatacttatatagaacgtggtattaataaattatattctcgtcttattattggtgatagctacacacaaagtgaagttttcgacagcatcaactttagaggctttcaactgtcatctgatgaagttatgttaccggatagccaaagaggttttgctccgattattcgaggtgtcgcccggactaatgccgaggttactatacagcaaaatggttatgtgatttaccgtaactcttttccaccgggtccttttgttattgatgatctctattcaacaagtaacagtggcgatttagaggtaaccattactgagtctgatggttcaacacaaacctttactgtgccatattcatcagtccctttattacaaagggaagggcataccaaatattcagtgactgtaggtagttaccgttcgggtaatgatgagcaggagcggccttattttttacaaggatcagtgatccacggcttacctgcgggttggaccatttatggaggaacccagttatccaaaaattaccaagcggcaagtattggggtaggtaaaaatattgggcgttttggggctttatcatttgatattaccgaagcgagatcaatactacccgatgactctacacaccgtgggcaatcgatacgtattctttataataaatctatcaatgaattaggcacaagggtgcaacttgccggttataaatatgcgacgagtggtttttatactttagcagagactacttataaaaaaatgagaggaaattatatacaaacggaggatggtgttgttgaagttagtggattaccacaaagttactacgaccttatttataataaaaggcaaaggatacaactcaatattactcaaaaaataggtgatcaatctacgttatatattattggtactaatcagcgttattggaattctaaaaaacaagataatcaattacagataggccttaatactattattaaaggtattaatttaggcctaaattatagcttatctaaaacatcatggaatgatagtaaagatcagatgctagcatttaatactagtattccttttagtaactttatgcgttctgataatgattctatatggcaaaatgcgagtttaagtactaactcctcgcataacatgaagaaacgttttaacaatactataggattaaacggtacattattggaagataaaaacttaagttacaatattcaaacaggttattctcatgaagaagaatcggactcaacaggatatgcctcattaagttataacggttcttatatgaatagcaatataggttataactataccgatacatcacatcaaataaattatggtatgagtggcagtattttagctcactcaggtggtataacacttagtcagcctatatatcaaacagcggtgttagtaaaagtacctgaagttaaaaatataaaattagaaaacaatagtggcatcacgacagacagtaatggttatgcggttttaccttatatttctgaatataaagaaaatcgtattgcattggataccaattcattctctaacaatattgaaatagataatgcggtgaaaagcgtagttcctactcgtggagccattagtgcgatcacatttgagcctagtgttgggataaaagcaattacgacattaacccataaagggaaaccagtacctttcggggctatcgttgattcaggtaataatactgggattgtggcagatgaaggaaaagtttatttaacagggttatcaccttcaggacaattaaaagtgaattggggtagtaagaaagagcaacaatgcttagtaaattacacattaccaccacaagatccagataaactttatgttgaatatagtgcagagtgccaccctattaaggaataaataatgactaataatattaagggtattttgacaacactatggttatttttcttatcattatcacctaatgttgcatattctgccgatagcattattcaaataacaggttatatgagagataacacctgtgcagttgcaccagaatcacaataccaaactattgatttattaaataatgaagttaagcggttatataaagtgggagaaacaacaccctttattccttttcatataatactggaaccttgtggagaatcagtgattgctgtgaaattctattttaatggtatttcagatagaaataatccttcattattagcgttagatccgatagcaacatctgcttctggtgttggaatacaaatattagatagtgaaaggtcacccattcctattaatccaagtagtgaccaacttaaatggatccccttagttgcaggaaaaagtaacaccgtttttttctatagtcgattaatggcatccgatatgcctgtcttagctggaaaaattaaagccagtgccacttttacactcgagtaccaatagagataaagagaatcaatgatgaaatataaatggcgaggagtaaaaaacgtaatatttgctattttatgctgcaatacttcattcgctatggctgcagatgcaacaattactgttaatggaagtgtaatagcaaggccttgtgaaacaatcacaaaaacagccaatgtggacatgggcgacctatatacattcgattttatgacccctggctctacctctaaatggtatcccgttgatttggagttaagaaattgtcctattggtacaacttctattgaagcgacattcaccggtcttgatgatagtactggatactatagaaatcagggctcagctaaaaatcttcatttagaattacaagatactgcaggtaataaattaagaaacggttcaaaaaaagtggttgaagttggtgagtattcgtttgccgcaatctttcctttacgagtaagagccatctctgtaaatggtagacctacacagggatcagtacaggcaataattaatgttacctatgtatttatgtaattgttatttaattaaattatagaaaaaacattatgataagctataaaaaaacaatgcgttttttattgtatttaagcttcggtttattttcaaactcagtactatcatttacttgtaaagtcgcttcaacgggacaaattgtcggtgatggtgctgctaatatacgcgttaatttaacgcctcgagttgaagtaaaccagaatttggtagtggatttatctcaacaaattctttgtaaaaatgattcttatggtggacctagagatccaatagacgttgaccatgttaatttagttagtggaacgacttttggaggcgcgctgaataattttgacggctctttattatggtataacagttattatcctattcctctttattacgatacaaaagttattaatattaaagacagaaattttatcccactaaatcttagattgtatttgaaaagtattggtgctgcgggagggaagcaaataaataagggggatttaattgcaaaaatagaaatgtacaaaattgcagattgggatggtgggcaccctcgtttttttacatggaatatttacgcattaaatgatgttattatgcctactgggggctgtgatctttctagtagaaatgtcacgattaatcttcctgaatatccgggtaatgcgcaacctattcctttatctattttttgtcctagacaacaaaatatttcttactatttaacaggatcaacgtctgatgtgaataatacggtctttaccaatatatcatctaactctcctgctaaaggggttggaattaaaatatcaaataataatggtgttattcctgctaatacaccggtcaaattaggcaatgtgacgaataatagtgtgagtttaaggctatctgcttcgtatggtgaaacgggagaaagagtaagagcgggtaatgtaaaatccgttatcggtgtgacctttgtttatgagtagatgtttattaaaataaagtggaataataattttattttccaccttatttagatttcaaaaaatatctacttattcaactaattctaaaccagccagtttacgccaataaccattacaatcatgatgatggatggtgttaatagggtgtgcgccttgttcattttggcgaaattgttttaaggtagtaaaaacttcatcagactgcggtgaaagacggacgatatcgactaaacctgccattgaagttaaatcattacctaaattgtaacagtagccactttgcgtttgaataccatttaaaacaaacacttgttggttttcttgtgataatacctgacggccttgtgggtatttttgacagcaggtttcacaatcatctttagcacgattttccgagcgagcagtaaaacaacgcgctgaataagccaaaggaagatgaccataagcgaatacttctacttcaaatttatctctaatcgctaattcttcacattgaattaaaagattatttaaccactcacgagatagttcaactggcatacaccaacgtatcatgccttgtttctgtaataaacgtagtgcataagcgttatagcagtttaatccatggcctactacaaaaggtaaatgacgctcataaagcatattgatcacaccaaaatcatgagcctcaactaaaaattcaccgttatccaccagctttgctatctcttttagttcagaaggcgcttgtagtagtgctaaggtagaaaggatcacttgtttaccacttttagccacttctttggccagattaatccaatcttgtggtttagtctcacggcgcttactacagactgtttcgcctaagtagataatatcagcatcgctctgttttgcttgctgataaaatgtctcaagtgtttctttttgccaataataaagtacagagcctaatgcgtatttcatattattatcccttattattgccatttccggtggtaagcacctaatgttgtttgtgttccttcagatatttttcctaatgcactcatccaacgcggttgggttttaaaaccttgaggatcttttttacattggtcaatagctgcacgccatactcttgcaacttcagtaacatacgcggggctacgttggcgaccttcaattttgacagaggcaatattcatagccataagttcaggtagtagcgctagtgtatttaagctggttggctcttctaaggcgtgatagcagtgtttatcaacaaaataacgtcctttacataaagtaggataccctgcattttcatcaggagcataacggtctattaagacatcattgaggcgagattccataccttgtggtgtttgctgccaacggacaaaacgagctggggaacaggctccgacagtattaggcgattcaccagttagataagaggaaagataacagcgtccttcagccatgatgcacaaactaccaaaggcaaagacttctaaaggaacaggactactttgagccaattgtttgacttgatgaatagaaagaacgcgtggtagtacaatacgtgcaacatcaaaattgcgttgataaaatgcgattgcctgagtattagtggccgacgcctgtaccgatacatgacgctctatctgtggatagcgttcagctgcgtactctagcatagcaatatcggccaaaattaatgcatcggcacctaaatgagccgccatatcaatggctttttgccagcgttcaaatccatcaggatgagcaaaagtattaatggcaatatgcagttttcgctggtggcgatgtacgtaattgacggcttcttgcaatttcttttctgtgaagtttaagccagcaaaatggcgagcattggtgtcatcttttaagccgatataaacggcatctgcaccattatcaacagcggcttttaatgcgggtaagttacctgctgggcacaacaattccatcttcacttccctttagagattaaaaatgatcagaaattgtaataagcaggataaaaaaaggttttgatttagggcagagaatattgagttttacttaagtaaaattaaataactcaaaatatgaacaaccgattaacggaatattgatgtaggatcgcagaatcgctatctatatctggcacaatagccgcaattaaatgttaaggagtccgaaagtgtttaataaaattcgcacccgcctagttaaagatggccctcgtttcttgcgttaccctttgcaaatcacgccatttgctttgcaacgtgatattttagaacagtttttaagttggcaattccgcgaagcattagctgagggggatttacacttcttagaagataaatggctaaaggtagaaattaaagatttacatttgcagtggtttatcagtgtttgtgatgataaattaatcgtaagccgttctgaaaaagaagatgtaagttttagtggtaatgctaacgatcttattttaattgccgcgcgtaaagaagatccggacaccttgtttttccaacgacgcttacaaattgagggcgatacagaacttgggttatatgttaagaacctaatggatgcaattgagttagactctatgccatctgtattgcgttttggtttactacaattggctgattttgtgaaaagtggccttcaagatgaagttgaagacaccgcacacagccatgaactgagctcaacttcatgctaatacgtgttgaaattcctgttgatattcctgctattgatgatcttttacgccaatcatttccaacaggcgcagaagccgatttagttggtcacttacgtgaagagggattattaaccttaggtatggtggcaatcaatgacgaaggccggattgttggttatatcggttttacacctgtagatattgagggaaaagattgccaatgggtaggacttgcgccattagctgtggcgccacaataccgtggtcagggcatcggtcgtcaattgattaatgaagggcttgatagccttaatgagtttggttatggcgctgttgtggtattaggtgagccaacttattatcaaaaatcaggttttataccggcaaaatcacaaggcttgcattgcaaatggccgaatacagaagaagtatttcaattttatgctttagataatggcaatgttgatgatattcacggcttagtgaacttttcgccgttatttgatgaggtttgataatcgcatcttttcattatgctaaatactgtgcaacgtctgaaggctgatcaatgatcagcttttctttttgtattttttttaactgttttaaacgatattcaagttgagacgcttgttgcctatcgccaacttggcaataaaactccaatgataatgggcctttccctcttagtgctttcgcgccagttccattttgatgctgattaaatcgtcgctcaacatccgttgttattccggtataaagagagccaagacgatttctgacaatatagattgaccattgagtatcagccatcttttttcctttttgtgctacttatgattttaataaacaaaatttcttaatttctaacggtagttattaacaaacaactaagtttcaaatcttgtaattatatcaacacgttgtgaaaaatttatgacgtaaaaaacgtttttctaaaaaaatacattcaattattttgaaaaagaacagcaataattgctaattttaaagttaaattaaaatgcataatatgatccacatcacagagacacactccgcgatagataacaaatttagaatttaattggagttcatcatgaaaaaatctacattaatcgctgcaacattagctttaagtgctatttcattcggttcaatcgctgctgacagcgtagcaactagccatacctctactggtgagtatatcacaattacaggtaacgatactttagatggcttaacaactaaaattgcacaaatcgcaaaagatgaaggcgcaactggttataaagttatcggtgctacaggtgacgattatctgactgtaaatgcggaaatttatcgttaatttataattattctcgataagttacctgcacaaagagacacgcggtaagacgcttgttttggtgatataattatcacctaaacagcgtctcttttagtttctatgcaggtaaattatgtctacgccagactcgatcaaaataattaaacaatatatagccagtcaccatgtgtttaccttatgtacaactcgtgcattaggggatatttggtgcgcgaattgtttctattggttcgatgaaagcaacatgcgacttgtttttctctcagaaaaacatacacgacacgcacaaatgatgcaggaaaatttatttgttgcgggcagtattagtactcaagagctttctgtcgccaatctgcaaggcgttcaattcaccggtacagtgtctttattaaccgctaatgacgacatcagagcaagaaaacagtattgcttacgtttccctgtggcgctagccgccatccatgtgcctttatggcaattacaattgcaagaaattaaaatggtgaataatcagctcggctttggtactaagctcttttggcaacgtcactaagttactgcttattgccaaaagtagtaatttttttgctcccaaccttttaaagacatacatgaggtatagaatgtttttctatcttcttgattaatatctgctacatagctttctgtcatcggaacacgttctgtataggtctttttatccccacaacgctctttgtcgtctttacggcaggttttttctacatcacgataaacggtgtgctgtagtacctctttacgaatagggtaacgtgtattcgcatccaaatcacaaattaactttgcttcttgtaatgtgtaatcgggtaccccttttggctcccatttactactacacccagttattaaaacgattgaaattaaaggtaaaaaaacaaatttcatattaaatattgtcataaaaagaagaattaagaatactaatcataaaacaaaactaatcactttgactattgtttttgaaaatgattcgcatttgataacgggggtgactaaataggagcgctttataatagtgaagtgatccccagtagtgaggtgatttatcactggggatcatgggatattactcaaataatgaaagatttttttctatctctgcatctatttcagtatgttggagatgtttaacaccaagtttctttttcaattcactgcctagcttcacgagttgatctcgattggctttcgattgctttttaccccatttttttaaatggtagttcagttcatgatcttcagaaaagcttacatatttattatcacttaaaggcatatatcctccagttaattcaatgtgtattacttcaatttatggatcacctgattactactaccgcgccacagtaatgcgggatcataaagttcttgtacgaatttgccgtcaatcagtacgttaatatagctaacgacttcttgttgctctggggttaagtcagccaataaatagcctgtccaaacccaaatatctttctcagggcattgcgttttaacacgttttaccaattttaatatagcagaaagattttgggggtgcaggggatcaccaccggaaagtgatagtccttgtcgtttaatacgagtgtcttgtaaatcagcaatgatctgatcttccacttcttgggtaaacggcttgccagatgttagtgaccaagttgatttattatagcaaccacgacattggtgtacgcaccctgcaacaaacagggtgcaacgtgttcctgggccattgacaacatcaacagggtaatattgatggtaattcacagtattaacctaactgaccattagccagatgtttaactcgacgtttaacttcttcttgtttaccggcattaaatggacgcgaatcaggactgcctaaatagccacatacacggcgtatcaccgagactcttgcagggttgtgattaccgcatcgagggcaggtaaaacctttactggtacaagaaaattcgccggtataaccacagtcataacattcatcaataggggtgtttgtgccgtagtaagggacacgggtgtagctataatcccaaacgtcttctaatgcttttaggttatgttgtaagtttggatattcgccatagcatatgaaaccaccattggctaatggcgggtaaggggcttcaaaatccaacttatcatatggattgacttttttctctacatctaagtggaaactgttggtgtaataacctttatcagtcacccccggtataataccgaattccgctgcatctaaacggcaaaaacggtcacataagttttcactaggtgtactgtaaagactaaaaccatagcctgtttctgctttccattgatctgtagcttcacgtaaacgctgaataattgctattgctttagctctcaatgtttcatcatcaaagacgtgtttttgcgtaccaaataaggcattaatcgtttcatgaacaccgatataacctaatgaaatggaggcccggccatgtttaaaaatttcagcaacactgtcatccgcttttaaacgtacgccacaagcaccttccatataaagaataggggcaacacgtgctttgacgttttctaaacgagcaattcgggtcattaaggcttttttagccaattcaagacgtttatcaagcagcgaccagaatgcggcttcatctcctttggcctcaatggcaatgcgtggtaagtttaaactgatcacccctaggttattgcgcccttcgtggagcatctcgccattttcttcatagacgcctaagaagctacgacaacccattggggttttaaacgagccggttacttttaccacttgatcgtaatttaaaatatcagggtacatccgcttgcttgcacattctaaagcaagttgtttgatgtcgtagttaggatcaccaaatttatggtttaagccatctttaatagcaaaaaccagtttggggaaaaccgccgttttgcggtttttacctaaacccgccatgcgattttcaaggattgagcgttgaattaaacgtgcttcttttgatgtgcctaggccaaagccaaaggtcacaaaaggcgtttgaccattagccgtatgtagagtgttaacttcatattctaaagattgaaaagcgtcataacactctttttctgtacgtgcgttggcataagcttctttatccgctatttgccattcttgcgccactttatagtgtttgtcgtaactggctttgacaaaaggtgcaaggacttcatcaatacggttgattgtcgtgccaccataaatatgactagcgacttgagcaataatctgtgcagtcaccgcagtggctgttgaaatggattttggctgttctatttctgcattacccatcttgaaaccgttggttaacataccattgagatcaatcagcatgcagttaaacatagggaaaaagggtgagtaatcgagatcatgataatgaatttcaccgcgctcatgagcgagtaccacatctcttggcaggatatgtaattttgcgtaatgtttagccacaattcccgcaagtaaatcgcgttgggttgggataactttactgtctttattcgcattctcgtgcaagatagagacatcactctgttcgataagaccgcggatttcctgagttaatcgtcctcgttgctcacgagcaacatctcggtcatgacggtattcaatataagctctggcaatatctttgtgctcgccagccatcagctgattttcaacggcgtcttggatctcacggatatcgacattcgaacgtcctgcgagagattgtgaaacagattgagcgacaaactcacaataatcatcatcagtgatctgacaagcttcggctgctcttttgatagcatcgctgatgcgggtttggtcaaaagagactttacatccgtctcgttttatcactatggttttcacaatctggctccttaactatttatccacaggctctaatcccataaaaacaggtgatggcgtagcattgagactaattgtggataaggtgtgtataattactatatgttgtatctgtgtatttattaaagcacaatatatagtaattggaagcgaaataatcttgagtaaaactgatctaaatcaaggtatttttgctacatcaggcttggagagggcttggctgaattgtaaatctgagataaaaatggcagtaataaatgattgctcatttattgagaatataaaaaaagcaaagtgctcataaagagtactttgcttctttgatatgacaggtagaaaaataaattagcggatcgcgataacttcgatttctactttggcatctttcggtaaacgagcaacttcaacacaagagcgtgctgggaatgctgcattatgctctttaaagaaagcttcataagctgcattaatagtaccgaaatcatttaaatcttttacgaaaacagtcgttttaatgatattagcaacggttagacctgctttttcaataattgctttgacgttttctaaagattgacgtgcttgctctgccgcattgtcagacacaaactcacccgtagcaggatcaacaggtaattggcctgatgtgatcactaaattacctaaatcaacaccttgtacataagggccgattgctgcaggggctttttcggtattaatttcgtaagacatgtagaactcctgtttttataagattcatgctaacgcttgattagctcagcgctattatagccagcgcagaagacgagcaatatgatagatatcaggctttatcataaagtctataggtataaaaagaaaataatcctaacgctttctcgcctttttatacgatatttagcccatctaaatcccccatttatagcaattttttttctaagatagtgcttattagctatttctattttttcataaaaagggatcaacgcgattgagaggggattattctatttttagggtaggtgtttactatctgccctatcaagcagggcagatagccaataagaaatcaacgaataacggcgtggcgctcaaattctttttcgcaatatttgcaggttaataccacgtcagacgcgaatttttttacgcgaaagctactttgtaccggctcattatggctaatacagttgctattagggcagggtacaacatcttcgagtaattcaggtaaacttagcgccattttattgacgacttggtagtcatcaataatattaaccgtcgcttgaggggcatacattgctaagcgatttgcttgctctgcggttaaaaagacattttcaattttgattaaatcttttttacctaggttttcagaaggaagattaaaacctaccgttattctttcgtctgtttcggttaaacgaaatagagataggatcttaaagcccacctgcgccggaatatgatcaataacagtcccacgtttgatagcttcaacttttagtttgtgatcatgagtcatggtgtgctccttattaaagaactaagtttttatttagaactaaggcaagtagtgcctgacgcgcgtaaataccattacctgcttgttggaaatagtaagcataaggggtgttatcaacatcggtggtaatttcatcgatacgtggcagggggtgtaatatcttaagattatcttttacattcaccagatcagcactggttaagataaattgggctttgacattggcatattcagaaggatcaaggcgctctttttgtacccgagtcatatacaggatatccagctctgacatcacttcatctacagtttcatgctgactatattcaacaccatgctcttcgagtaaatgcaagatatgctctggcatggccagcacttttggggcaataaaatagaggtgatttcctgtaaatttggctaatgcttgggctagtgagtgtactgtgcgaccatattttaaatcacctaccatcgcgatattgaggttatctaatcggccttgtgtttctttaatggtaaacaagtctagtaacgtttggctagggtgttggttggcaccgtccccagcattaataacggggatatccccagcaaattcagaggccaaacgtgccgcaccttcttgaggatgacgaataacaatggcatcagcataagtacgtagtacagaaatagtatcagctaaggtttccccttttttacctaaagaggtgttactaccatctgcaaagccaaccacagatgcccctaaacggtggattgctgtttcaaaagataagcgagtgcgggtggaggcttcaaaaaaacaactggcaatcactttgtcttttaacaattggctattggggtgctgttttaatttgtcagcaacatggagaacagactccagatcgtctcggttcagatcattgatggagataatatgcttatgatagagcggattagtcattagagttctcctttgatgatacgataaatggtgcgatatgtgtttttctacagaccaaaaaaaacccctcaatgagaggggttttaaaaaatagctttttggaaaaaagagagcgcttacgaccggttagggtacgtaatgtgacaacaacttggcattggcgttgtttcatctttcctcctgacaaattgtggcgcattatacgcatctttatcttacacgcaagcgtttgcttttaattttttgcaaaaaaatttttttaatttaaaaatcaattagcttaaagaaaaggcaaaaaagcaccctttgtttaatcattaaaaaacggtgcttttgcatgaatatgtatttttaaaaaggatttgctaaggtcgccaccataaccgctttaatcgtgtgtagacgattttctgcttcatcaaatacaatactgtgttttgattcaaaaacctcgttagtgacttcaaaaccaccatataagccaaattcttctgctaatgcttgccccattgttgtctcttcatcatgaaaagccggtaaacaatgcaggaatttaacgtctggattacccgttagtttgattacatccatattaacctgataaggtttgagtaacgtaatacgctctttccaaacttcttttggctctcccatagatacccacacatccgtgtagagaaaatcggcgtttttaacgccttctgcgacattttcagttaaggtaattttccccccattttgctgagcgatattttggcattcagcgactaattctgcttgtggccaacacgcttttggtgcgactaggcgtaaatccattcctgttaaggcagccgcttcgagtagggtattgcccatattgttacgagcatcaccaagataagcaaaaatggtttctgataatggttttgtttgatgttcagtaatagtgagcaaatccgctaataattgtgtggggtgaaactcatcggttaatccattccaaaccggtacatcagcatattttgccagcatttctactgttttttggccataaccacgatattgaataccatcatacatacgtcctaacacgcgagcggtatcttttatcgattctttatgaccgatttggcttcctccgccgagataggttacattcgcaccttgatcaaaggcggccacttcaaaggcacaacgggtacgggtggaatctttttcaaaaatcagcgcaatattttttcctgtgagatactgctgttcatggcctgatttttttgcttgtttgagttctagtgataaagccagtaattgttgtatttctgctgatgagaagtcgagcaaacgtaaaaatgatctttggtagaaagggttcatagataagtatcctataattgaatttatattcaatttaatacaataaatattcatcatcaacccttaaacgtcacttttgaatgaaaaactctgcgatatgagccttatttaactatggagtgtttattccccctgtgggagaataaccaagatatctttcagactattgcggagcggaattatggcggacagcaaagagctagcagaacaacgtgaagaaacacgtcttattattgaagaattactcgaagatggcagtgatcccgatgcactgtacgcaattgaacaccacatttcatgtgaaaattttgaaacgttagaaaaagcggctgttgaagtttttaaattaggttatgaagtcaccgagcctgaagaaattgaaattgaatcaggtgagatcttagtctgctttgatgcggttagtgaaagtggtctaaatgctgaactgattgatgcgcaagtagaacagttaatgaatttagcggaaaaaatgggtgtctattacgacggctggggaacttattttgaagatcccgacgctgagtacgatgacgaagatggcgaaaatgaagatgacgaaagcgagtctgataagtcatcacgcctgcactaattggcgctatatgttgtcccaatgtaccagtctttaggtgcaaaaaagaacacccgccacaaattctttttgtgacgggtattttttaaatggctaatccatcataccaaacttaccattgtcatagtcatcaaaagcttgtaataactcttgttgtgtattcatgacaaaaggcccttgtcctactactggctcattaatgggctcacccgttaatattaatacgatagcgtctcccatggatcctaatgttagggtatcaccgtgggtatctaatattgcgatttcatgttgacgtacaatatcactgttattgagatgtatcgcacctttaacgacaaatagcatcgcattatgtccctcagggatagcatagtgtgaagtacccgcatgatttaagcgcacatcccacaggtttacaggggaataggtcatagcaataccagatgtatttgcatagtcaccggcaatgactcggacatagccctgtgcattaggtaattgcacatgaggaatatcttgcgcttttagtgcttgataacggggttgtgccattttatacgcgcttggcaaattaacccacagttgtacgacttcaagcatacctccctctttcgtcattttttcagagtgatattctttatgtaaaatacctgaagcggctgtcatccactgcacatcaccttcagcaattgtaccggcatgaccggtagaatcatggtgagacacttcgccttgataagctatagtgaccgtttcgaatccacggtggggatgagtcccaacaccacgcgcattagtaacaggcttaaataatgtaggctcagcataatccattaataagaatgggctatattgctctgcattctctttataagagaatactgtgctcatagaaaagccattaccaacccaatgtggattaggtgctgaataaatttgttttacctgtctcattgtcatgatgtttctcctgattaaggaaagaaaccgcaataacccagacacagaaggaggtaatacaggttatcgcgatttcttaatgagtatgatcataaattgttcgctctataaacaaaatagggggaatttgttgatggtattcaaaaaaaatgaatgatctttttaaggtaaaaaagtcagagatgataagtagaaaagcctaacaggaaaaatgattttaaaattattattaattattttccaaaataaaaaccacattctgctttataaaaataactcagaatgtagtttattcataaaactatatattatttattagtatcgccgcaaccgccgataattttagagatagatactgctgggtgtaataaatagtcgtagttacaatctttttctttgttgtaaacactaccagtacaaccagtcattacggtaacaaaagaagcaataagtgcaattttgacaaagtttttcataagaaattcctttttaattttagaatgttaaaagccatagcatgactttctgtgcataaagatattaaattatctataaatagcaatataaaaaaataggaattttaaaatagaacagaaactaaaaaatattttatttaagatgtgaaatatgattatctagagtaaaatgagaaataaattaaacttgtgtttttttattaaatttaagataaatatttaatgtgaaatagattgctaataatttaaatatagattaatcattaaaaatagccgtaaaatatcgctcttttataccattaagataaattcattttatattgataagtgctattgtgagataacaaaaaacccgcattaaatatgcgggcgtttagatctatacagcatgtagatacatggttataagaaatatcaaagtgatttcagcatacgaatttcacagtcgctgtggcctgtattacctaatgctttatcaataaactcaaagcctaatttttcatatagaccaattgctgcttttaaaatatcagtagtttctaagtagcagcgactaaagccttgttgcttaccaaactcaagagattgctgaacaatttttttcgcaattccttttcctcgtaacttagaagagagatacattttctgtaattcacaagtctccccatcgccacctgcaagaggtgcgacaccaccaccaccaacaatttcgccatccatttctaccacccagtaagcgctgcgaggttgatgataaacttcgaataaggtatctaaaatcggatcagctactgcaaatcctttatccgctgttaagccatgctcggcggaaacttctcgaataacgcgtgcaatgccggcgttatctcttttttcaatggctctgataataatattttgtgttgcattagggtttgcagtcatagttgcactcatcgttttacttattagtagaatattttttgataatgtattgagagagcaccggaaaggaacttcttcattgaaagtagcactgagggccactgaaaacatcttaattgattaaataggattgtaaactgttatgcctgtttatttatatgattaggatatttgttggtagagatatatttcaaatatctatttcattagagcgagaataatagagaaaaggcattatatagcactatttcactgcaaaacgagtcacaatatagtgaaaaaatgttttatttttaggtttagtgataaacctatatcttaagtagtaacgatattaggtgttaaaaataaactaaaacccgcaatcaatgcgggttttagtattaatggtgcaataacttataacgcagcaatagagactttttgggcaatcagcttctctttagcatttaaacaagatgctaaacgctcacgctctttggcgacaacagcctcaggtgcgcgattaacaaagccttcgtttgataatttgctgtctaatgtagtgatatctttctctactttttcaagctctttatctaaacgggcaagctctgcatctttatcaataaagccggccattgggatcaacagctctgcaccgctcaccagtttagttaccgataatggtgcttcttcaccttccgctaatgggcgaatatccgctaagcgacccattgcttttaagaaaccaatgttatcactgacgcgacgtttagccgtttcatccgcaccacgtaaaataacatccagtggtttacctggcgcaatattcatttctgcacggatattacgaactgcgacgataacctctttgatccattccagatcgttaagtgcttgctcgtcgactaatgacgcatcaaattcagggaaagcttgaagcatgatggtttcgccttcaatgcctttcacctctttaacgcgttgccagatagtttctgtaataaatggaataattggatgagcaagacgtaacagaccctctaatacttcaatcaaggtatgacgagcagcacgtttttgagcatcattacctttatgaaccgccggttttgataactcaagataccagtcacagaattggttccaagtgaattcgtataaaataccggcagcaatatcaaagcgataattatctaacgcttcacgataggcttttatggtgttattgaattcagctaagatccagcgatcagccaatgagaatgtcatctcaccaccttgatagccacagtcttgatcttctgtattcatcagtacaaaacgactggcattccataatttgttacagaaattacggtaacctgacagacgtttcatatcccagttaatatcacgccctgtagaagctaatgccgctaaagtaaagcgcagagcatcagtaccatgtgcttcaataccttctgggaactcttttttggtgcgtttagcaatacgctcagccatttgtggctgcatcatattaccagtgcgtttttctaacagtttatctaatgtgataccgtcaatcatatctaaaggatcaagtacgttacctttagattttgacattttctgaccttcttcatcacggataaggcctgtcatataaacggttttaaatggaacctgtggtttaccttcatcatctttaataaagtgcatggtcatcatgatcatgcgggcaatccagaagaagataatatcgaaaccgctcactaatacattcgttggatggaatgttttcagtgcttcggtgttttctggccagcctaaggttgagaatgtccacagtgcagaagagaaccacgtatcgagtacgtcttcatcttggcgtaatgctacatcggcagcaatgttattttcacgacgcacttcttcttcgtcacgaccgacataaacattaccttcgttatcataccaagccgggatacgatgaccccaccacagttgacgagaaatacaccaatcttgaatatcattcatccaagagaagtacatgttttcgtactgtttaggtacaaattgaatatcgccatttttaaccgcttctaccgcaggtttcgctaaaggtgccgcacggacataccattggtcagttaataaaggttcaataaccacaccaccacgatcaccgtaaggtaccgttaaatcgtgaggtttgatctcttctaataatcctaaacgttcaaattcagcaacaatagctttacgtgctgcaaaacgttccataccttggtaggcttctgggatctctgtgctatatacatcagattcaacaccgttagtgtctaatacttctgcgctaacacgaatgttgccatcaaaatccatgatattaatcatcggtagttgatggcgacgacctacttcatagtcattaaagtcatgggcaggggtgatttttacacaaccggtgcctttttccatatccgcgtgttcatccgctaaaataggaatacgacggttcattaaaggtagaataacctctttaccaatcagatctttataacgtggatcttctgggttaaccgcaacgccagtatcacctaacagtgtttcaggacgagtcgtggcaacaatcagataatctttaccctctgccgttttaacgccatcagctaatggataacgcagatgccacattgagccttttacttcgcggttttcaacttcgagatcggaaatggcagtgtgtaatttaggatcccagttaacaagacgtttgccacgatagataagatcttctttgtgtaaacgaacgaaggcttcttttactgctttagataaaccttcatccatggtaaagcgttcgcgatcccaatctacggagttacctaaacggcgcatttggttagagatattaccgccggactctgctttccactcccaaattttatcgatgaaagcatcacggccataatcatggcggtttttaccttcttcagcagcaatcttacgctcaacaaccatctgtgttgcgatacctgcatggtcagtacccgcttgccacaaggtatttttaccctgcatacgttgatagcggatcatggtgtccatgatggtttgttggaaagcatgacccatgtgcaagctacctgtcacattaggtggtgggatcacaatacaaaagctttctttggatgtatcaccattggctttaaagtagccatttttttcccaatgttgatacagaggttgttcaatctctgtcggattataagttgtatcgagcgatggctctttcggtgcggatttattttccatattctttacgtattcaataggttggcggcgtagccattgtcaaagtaaagccgacgctacgataaattttatatcgttctcgcgccaactgttttaattgttcatcgataggtacgaagtctatcacttcatggaaagctgtggcaaagtctgcaaattgtgactgcaaattaatcaggagatcacgcggggcattgccccgtttgcccggccaacataattcaacaggcgcaccataacgaggcccttcacctgctaggttatgaggcacaaattgatgtggctctcttgcccatagtgcttcatccaacaattcagcttgtggctgtgaatcacagacgagcaaaacccgtttgcctaaacgccaatgttctgcggcaagttgacaagcaagccattcatgggcttgtaaatcttgatgtattgatggatgttccattaaataaaacgtggcgtttttcatgatatcccgataatagaagggtattgcattgcaatacccttctatgagtctgctctatttaccttaataattatgcggtattactcgtcgctattcaaacctgcgcggtttaataagaactgcgacagtaaagatactgggcgacccgtagcaccttttgctttaccagagcgccatgccgtacctgcgatatctaaatgtgcccagttatatttgcttgcaaagcgcgctaagaaacaacctgcggtaatggctccccctaaacgtccacccgtattggcaagatcggcaaaattagattcaatttgctcatagaactcttcgcctaaaggtaagcgccatgcgcgatcgcccgcttgctctgaagcattcattaattcatgggctaatgggttatggttagacattaatccactataatgatgacctaatgccaccatacaagcccctgttaatgtggcgatatcaataactaactcaggctcaaagcgctcaacgtaggttaatgtatcacacagcactaagcgaccttcagcatccgtatttaatacctcaacagtctggcctgacatagtagtaagaatatcaccaggacgataggctttaccacccggcatattttcacagccagccaatacaccgatgacattaataggtagttgtaactcagcaacgacgcgcatcacaccatatactgttgctgcaccacacatgtcgtatttcatttcatccatgccatcagcaggtttaattgaaataccaccagaatcaaaggtgagtcctttaccaaccagtacgattggacgggattcaggatcttgattacctttatattcaataatcgacattaaagattcattttgtgaaccttgaccgaccgctaaataggcattcatattcagctctttcatctgctcttcaccaatgactcgggtagagacattcgcggatgagtcagcgagttggcgagcttgagaggctaagtatgccgcattacagatattaggtggcatattagctaaatctttacaggctttgatccctgatgcaatagctaagccgtgggcaatagcacgttcaccgcttggtaattcacgtcgagtagggacattaaagaccattttacgtaatggacgacgtaattcggttttattacttttcagttgatcaaaggtatagaggcagtcttttgcagtctcaaccgcttgacgtactttccagtaattattacggcctttaacatgtagctcagtcagaaaacaaactgcttccattgaccctgtttcattgagcgtgttaattgttttctgaataatttgtttgtactgacgttcatccaattcacgctctttaccacaaccaatcagcaaaacgcgctcagagagaacatttggcacatggtgcagcagcaatgactggccgactttaccttccagttcaccacggcgtaataaggcgctgatgtaaccatcgctgattttatcaagttgctccgctatcggagataaacgacgaggctcaaacacccccacgataatacaagcgctgcgttgtttctctgggctgccgctttttacattaaactccatgcgttctcctgaatattaaagacaaaaacggaaagtatcgtttagaatagtgatccgcattaatctaccccatagaaagtttactttttatgttaagctaaatgcattaattgaacacaactaatttagctaacttataagcttgttctgattgggaacctgtttatagcatgttttgatatcatttgggctgcaagaatgtctaactgagatgcacaaatgatagatatacaacgaagttagcgattttcctgcaaaaagacaagttttcacaggcataactagcgtgattataattcgatatttagctcgggaaacccttaaaagtcagatagccatcttatttatcttgatgcttatcttctttagccaaaagctggttgaaattttaggggctgctgtagaaggtaatattcctacaaaccttgtggtttctctgctgtggctggggatccccgagatggcacagcttattctaccattaagcctttttcttggtcttctgatgacttacagcaaactttatgttgaaagtgagataaccgtcatgaatgcctgtggaataggtaaaaaagcattagtgcaagcagcactattgttgtcattacttactagcgtcttggcggcagggaatgtggtgtggttgatcccatggtcgtctgtacatcaagagcaagtgctggaagatgcaaaagccaatccaagcttagcggcattaatggaagggcaatttaaaatgtccagtgaccgtaatatggtgctttatctcggtagcgtaaagggcaaccaattccaagatgttttcttggctcaattgcgtccaacacaaaaccaacgcccatctgttgtggtggcggataaagggtataccaaagagctaccaaacggtaaccaagtcgtggtacttagcgagggtacgcggtatgaaggtacggcggtactacgcgattttcgtattactgattttaccgattaccaagcggtgataggccatcgagagtctactattagccgtaatcgcgtcgaacaaaaaaccatgaatgagttgtggcactcaacagagcctgagtctatcgctgaatttcattggcgtttaaccttaattttctctgtggtgatcatggcgttaatggttgtgccgttaagtgaagtcaacccacgtcaagggcgagtgttaagtatgttgccggcgatgttgctttatttggtgtttttcctattacaaagctccttgcgttcaagcggtgaaaaaggaaaggttgacccacttattgctatgtggacagtgaatgggatttattttgctttagcgctgttattgaatgcgtgggataccttaccaatgcgcaaactacgtgctcgctttaagaaaggagttgcctgatgtttggtgtattagataaatatatcgggcgtacgattttgcaatcgattttgatgacgctatttttactggtatcactgtctggcattatcaaattcgtcgatcagctgcgcaaagtagggcaaggtgattttacgaccttagatgcggggatttatgcggttttaaatatcctcaaagatgtgcaaatcttctttccgatggcggccttattaggggctttattagggttaggggcattagcgacacgtagtgagctggtggtgatgcaggcatcgggttttactcgtttgcaaattgccggctccgtgatgaaaaccgcgatcccattagtactgttaacggtattaattggcgagtggggggcaccgcaaggtgaacaatatgcacgtaattaccgtgcagaaaagatcatgggtaactctttagtgtccactaaccgtggaatgtgggctaaagatggtaatcaatttatctatattaaccgtattaaaagccaaaatgagatgcaaggcattacgctgtataatttcgataataatcgaaaacttgaaactgtgcgttatgcatccagtgccacttatgatccagataaaaaagtgtggttactgaaacaagttgagcaatctgatcttacttcgccacaaaaaatcacgggtaaaaaacaggtatctttagagtggcagactcgcctaacacctgaaaaactgagtgttgtggcattagatccagatgccttatccataagtggcttatatcaatatgtaaaatacctcaaacagagtgggcaagaatcagccaactatgagctgaacttctggaaaaaaatctttgcacctatttctgttgcggtgatgatgctaatggcgctgtcatttatttttggcccattacgtactgtacctatggggctgcgtgtggtaacaggaatagcctttggttttctgttctatattgtgaatgaagtttcaggccgattaagtttggtatatggcattcctgccgtagtggccgccttagttcctggtatgctctttttagtattaagtttatggttattaatgaggcgtaatcgctaagtagtattaacgattaacaatgcttaaagaaaaagcgccttcaataatcaaggcgctttttttatcggtctataagttgattatttcgtttaaaaactttgtgctaaagcacgcacaagggcatttgtacctcgagtcacttcactaaacttggtgccattagctttacgggtgatgacaacaaaaacaccgatatttaattcaggaatggttgccatataggtattaaaaccaccgccaccaccggttttttggtaaatagcaggcacaccattggcaggcgccatataaacccatcctaagccaatgccatccgctcgccctgcaacatccatcccttcaatagaagatagtcgttggcgcggaaaataaatagactgctctttactggccgtcgcttttctcatcgtattatttgagtttaaaaagccttgcatccaacgttgcatatctgcaggcgtagaataaacacccccacttccggcggcggcgatagtctcagaacaagggctgggtctataaccaattaataatcgctgacattgtgtgctatttggcgttaacgtggtatcacgcattcccgcaggttgtgtcacatactgttttaatagttgaggatagtttttaccagaggctttcactaatgcatctgctaataaatcataagccagattagaataagaggcagattgtcccgccggtgttgttaaagaggctttttttagccagttccagcgatcgccatgggttggccaaataaaaaccggtctaccccattttccgccgggttgttcacgaggaaaaccactggtatgggtagctaaatgataaagacgaataggagattgattgttcactaatggaatatcgacaccataataactatatttttgcagaggatcagtaaccaacaacttgccatcatcttgtaattttaacatcacttcactcgtcattaatttagtaatagaagcaatacgtattaatgagttcattgacggggtttgacggctatcggggcttgtagtaccaaaagcacgattaagagattgcgtattgttaatcatgacaatcaccatcccttgagggttacttttttgataaatctgctgagcatacttatcaaaaatctcccggctattattcgcctttggtgataaggtggttggccattgtgacaattcaggcacattatgttgattaaacttagcgggtaacgttggcgttaccgttgctcgttgactacaggcattgagcgtaagtagtgcaataggaatgaggagatattttaggagatgttttttcattttatgatcaacataacgagtaaggtgaaagaaaagagaacaaaataaatcagccataacataaatggatgattgttttatcgcgttactttttgtttttatttatcatttttagtacagcacctaaaacaagcccaataaaaataccggccatgatccagctaacaatacccataccatcccctttatagcagatttaaaccaaattttgattatattatcagaaataagaatgtctatcagagcaatagtgggttaatgaaaagttgatgtaaaataggctgaaggacttctacaaagagattttttgtgaaggacatcataaaaatcttattattggttattttttgtacataaaaagggtgaaaaaaacaggaaagtattacaaaggtgttacaatcccccctaaattttgcctatttttactttattattagcttttctttattattcggttaacagttgtttatcaagtaaatgttaattaatgaatttatattctttaaattaattggtttctggttttatattctaaatctatatttaaattatccattttcaagttttttgtaaagatactcactctacgtgttatactttgtaatactttaattgttgtgaaacatacaaataaaacttaatataatctcatcaaatcgacagctaaacactaaatgagagtaaagacgtattaacaaaattaacaagggaaaatggttaaagagaaataaaacataacaagatgaaaggaaagcgaataaataaaaagagagtaaaatatcgccgtaataaaataataatgaattaatcatcagtataaataaatctattttaatagagggctttttatttaaagataagacttttatttaactaagtattattatcttaaaaaataaaaatagtttaaataacagtaagtaaatcaatagataggcaaataaagctatttattaactatatagtaaagaaatagttagaggctatctattttaaataacaatatatattaaatataacactctatttaaaataaaaattcttccttacaccagggaagaaaagggcagtgacattaaaaaaataacgatagtcataaaaataaaattaagcccttaaattgcagtaccgtcggatcaaaacactaacccagttttgatcctttttttatatctcgttatatataatttaatatatcgattttatctactgctcagttataacgatgacaacagaagataatccattatgcacaaataaatgaagtcagtgtgctaagagacttagggattgagacttgttaaattcaatgttgcttatcgatagatgaatgttacaagtttgccccattcatagaagaacgataagataaatgcactttttttcgccaatcaaactgaaaaccaacaataattgttgcgagggttcctcacgcaagtataatgagcctgttttccaaacacacttcagtgccggagtggcggaattggtagacgcagttgattcaaaatcaaccgccttcgggtgtgccggttcgagtccggccttcggcaccataagaacatcaagagacgtcagcgggcgtctttttttgtatctgaaatcccagttttacaaggctttttcccacttttcagtcttcccaagtatactaaggtcaacccacatcaagtacctgctgttggtatatgtgttggtatctctcgattcgataatagtttgtaccaacagaaggagataaatcatggctcttactgatgctaaagtcagggctgccaagcctctggataaatcgtataaattgaccgatggtgatggtatgcacttgatggtacataccaacggctcaaaatattggcgtttacagtatcgctttggcggtaagcaaaaaatgttagcgctgggtgtttacccggatatttcacttgcagaagccagagagaaaagagatgcagccagaaagttaatagcgaatggttttgatcccagtgaaaaacggaaagaagtgaaagaagagcaacaaaaggaatttaatacattcgagaaggttgcacgtgattggcatgcaactaatcagcgatggtcagaagggcatagccatcgagtactcaaaagccttgaggacaatatctttgttgctattggtaaacgtaatattgctgaactaaaaactcgcgatctactcgaacctattaaagccgtagagatgtctggacgtcttgaggtggcggcacgtttacaacaacgtgtaaccgccatcatgcgctatgccgtacaaagcggtttgatcgactataacccagcgcaagatatggctggcgcagttgcgacaggcaaacgagttcatagagcggcattagagcttaaacgcctacctgagttcttagaacgcatcgatgattataagggaaggcctttaactaaacttgcagtcaaacttaccttattagtctttattcgttccagcgaactgcgttttgcacgttgggatgaaatcgattttgaaaatgccatgtggacgatacctgctgaacgagaagcgatagaaggcgttaaacactctcatcgcggatcaaaaatgcgcactacccatttagttcctttaagccgacaagccattgagatcttaaaacagatctatcaattcagtggtaaccacgaactgatctttatcggcgatcataatcctagaaagccaatgagtgaaaatacggtaaacaatgcattacgtgtgatgggctatgatactaagacggaagtgtgtggtcatggttttagaacaatggcgtgtagttcgttgattgagtcaggtttgtggtcaaaggatgcagtagagaggcaaatgagccaccaagagcgtaattcagtcagggctgcttatattcataaagcagaacatattgaggaaaggcggctgatggtgcaatggtgggctgattatctggatgcgagtaggggaggggaaatttcgccgtttagttttgcgaaaataagtaatgagatagtgtgaggcatgcagatacagttttacatatattgctaaatgctcatcaaaagctggtcagtaaagtaagagtaaattaagttattgaattgttggggttgattgaaggaaggctgactggacatggcttccgccacgcgatgagcacgatttcgcatgagaagggatataactctgcatggattgaaatccaactcgcacatatcgataagaatgcgattcgaggtacttacaatcatgctcagtatatggatggacgtaggtaaatgatgcagtagtaccatttttcaatggttaattccttgaaatatattaacaaagttttgactaagtagggtctagtttactgatgggatacataacctatagtttagtagtcaagaactcgaacttaatgtgctttactacagaacgaaaattaacgttgtgataccgaaaaaatttggtagctaaggaaggaattgtagttctttcatttctgtgaatatttaaatcaatttaataacaaatcaaataattagcagcctacaaataacattgatctaattcaattatttagaattatgtattggagctattaaataagttgtgctataaaggaaaaaatcaagggagattaaaatgtctatcgatatcaaaaagttaaaatcaaaattaattgaagattataacttcgctgacgagattagcgatgatgaactcaatagagttttaagtgaaatacacaaaaaggatgcctcaacacaaaaagaagtagacgaaattgtctatacggtattagagggtaaaaggcattattctttcgaaagtctggatacatccaatactacatcccttgcattacagttaattcaggcggcaaaggtatatgctcaaacacaaggaagatgaaagcattcacatagagagtaaaaaaaaacttgatatggaattgcagtttttaatagatgagatgcaagctggaaaggataaaaacactattcttccactgttgaataaactgcaattacagttttcaacctatgttactgattttgaaaattttatcgttcgagtttcagaaaatgggtattatcgttcaaaatgtgaaataaaagatgttttaattagcgtagaaaattttttaaattcaagtgcagttgttgcagaagcaataaatacagtttcaagcatattcaatttaccccaatgttatcaagaaggaaatttcataacaactgctcaaataatattaaggacacatcagaaagaaaaatctgaggaattatctaaaatttataagaataaaggattatcaacaaatggctttgatagtaaagaaaaaatttatttgaacagacacgggtttgatatgaccagatttatttcgttgatattaggattaatttgtatactgtattttttatatgaatacaagataggtaatataaacaatggtataagttggtttaattatagattgtttattccagcaggtttaggagcaataatattttcactatttccggcaaccatgcaattaaaattaagagcaggagtgacagccacagggattgtcgcatttattatatttttttatgctgtcaatccagcaaaagttcctgattttcaacttcataatattgatagcaaagaatcatcagtaaaaaacaaatgatatccaagcggaatcagcttacatttcaaaaggcaaaaaatccaaagtgaaatttatagcatatgcattcttgccatttactatcgcaccaataattggcattccatttgataaatacttactcaaaaactatccagttgctcttttcacagtaataattattttctcgtccttataaatccactctatttacttgtataaaaaatcatataaatatgttaatgatgctgttttagctatctttactggttgggttacattgatatacttactcacgggggaaaaacaagggagataattccttcggagaaactaattgaaacacatccattaatgtattatctaataatattaaaactaactattgttgtaaatgggtttttggctaaaatattgattacattaaacgaattatattatgctcgtaaagctgaaaacaaaagtgggaaatatactgacgttttaaaaatgactatttccaacattaaatctttttttaatcctaagaaggaaagggtcaaaaagtagaataatccccataggaattattaatgcattcattgaaataatagcagaaaaaaccactgataaataatcattctttgcgacataaagcaaaaaacaataatatttaaaaataacacaaagagataaaaagtatatatttaacattcataatagtctccttttttataattttataattttataattttataattttataatttaaaaatatattaatataacgaaaactcaacttactcgataaaaaatagttaataggatacattaaactgataattacattaataaatgcgagtgatgaaatttttgactgagatcataaattgttgaggcgtaaagttgttgatattccctaatgtgctaaaatgttatgcaaggatacatttttaaaaaaatgtcgataaataacaatgcattaggggttaacattggcttctttacaggttttgaatgctatcgctgttaggattacacctccagaggacgaacagaaagattggtcctataccttaggcgccctctggcccaccgatcagcaggaggtcatcacatttacaacgaaagtagatgcaagatttcataagagcagcaaatctcatgcgaagtttcaaaaaccttatccaggaagttctttcccttcaaagctgtcaaaatttttagagaaagaaacttcattcgaagtcttcgtacatgattttatccagaaaaagttaattacatctgcaagacaatccagagcaagtaatggtgcaatattggtttttactcattaccaactgcaacatgaaaaggaagatggttctgttcataaagatttcgagcgacttcttgttttgatgcttaaaaacacagatgcattaagattcaaagaaaacctacaactaaatcccgttgatgtaattgacttagataaattcttgcagggagcaagagttgatataaccagattcatgtctgaggaagtagaagatgaagataaaaataatttatgcttcatccgtggaactggtgatgtaagaaaatattttaccgaatcaattggtgccgaagatattatctccaataaaaccagtagtgagcaatgtattaaagctttggagcaattctctcaccaaaaagaatttggtcgtgctttgagagaaaaaatcgaatccaagattcaggaactatttaataattgtaagcgtggacagtccataacccttgaaaagattcaaacacaaatcgatgctattatacccgttgatttagcagagcataaaaatacattcgtagattttgtaaacgaaaatggatttgaagttaatgaagaattcgaagtatctgcaagtgataaaagacaatatgaatggttagattttgaaaccaatattgcaaaaatgagtgtaagaaaacatcagattggtttgcctggttctgatagaccaattatctttgacaccgaaacaaacgaagtaaagctaactcagaagattaatgatccaataattattgctcggctgaaagagcttgcaaatgaataatagagaaatgcttagtctcttgctaaaaataaagcaagaagctaaaaatatcgaatatgatgacccatatcaggtatgggtcttcgacaattcctcttatgtagcaatagaggacgatatttctcgtctaaaagaagttgatgatctaaagttagaggcaataaaaaaagaaaataccatcaaggtatcacttttattaacatcagatatcaattggttttctaccaccattgaatattttaaaactcttagggtaagaataaaaaacaataaagaagcaatcgataatttttacattgaaaaattaagttcagaagaaatagaaactatatctaattcttcaaacgcatatattcaatggtgtgaaatactctcaaaaattgcagaccacgtagaatacgatgattcaaatttttggccaaattatatttttgttatggaaggtggtaaatcaaagaaaatcaccacttacaatttaccattaaaaaatattgatgagaattttctaaattcggttgatgtaagcccgtgtgatgtttctactttgacaaatgttgatctgcactcctatgagcgaaaacttgtattaagatcatcgttgattgagttatataacgattcgagtgagaaaaatacgttccttagctcaatattaaattcgccccagaaattgtgggatttattttctattaactatgaaatatacatcaacaaatattccataaataaagtaatacacgaggttgaaactcagaaattagatttcttatcaaagcttaattctttgattcaagaacatcagaccaaatcactttctatacctgctgttctagtaagcacagccataataaagggctggtctccatctggtttactgcttatatttgtagctatgctacttacgtgctcagtcgttatattaggcatccgtaatgccaaaaaatcattatcagatattattgaatcatctaataagacgatggttttattcacaaaagagaatgctaatgatgatgacgaagcattaaccaaccgtataaatcagatcacaacagaagctttaataaagctcagtaataaaaaagttgatgccgaaaaaaccttgaacaagctccaatggttgattttcattggtgtttcagtctggtctatgtttgtcttatatcaattcaaagataacataatcccagttattgaattagcctatgagcatattaagagtttcgttaattatttattaagcaagagctaataaatagaagcgaagcttctatttattgccttgttttttctgccatatggttgaaaaaatcaacatctaaatttattaatactttttctgttttttaataatgctctgtaaactttcattttgttctatctgaatacgtttaagctcatctatttgggactgtttttcatcaattttagctaataacttactgttcaatatattcagtgtattttttgtttcagtaacttcgtcatgaacttcatttattctattatcgtactctatcgaatttattctattactttcaaaacttagatataaagaataaccttgcattagcattgatataaatactaatattatcccaatccaggtgggccttttggatgcagaaatagctgttgatattcttttatgaagtccttgaatgacgtaaatatctcccccgtcagctatactttcaatactggtagatatcgcgtcaattgaaaacatgaattcccacaatacttttcccagagaaaaagcgagtacaattgtgccaacaaaggctaaaaccgcaccgacaatagacacatactcagagttaatcataagaaaatcgaacatgctttttccttgtcacactataaaaacaaaaaatttaaatttatagcaaaactactgccggtaattttttagatgtcccatcacaaaggactcctctatttttacctgttcctttaattatcattccactacaagagaggaatggcttccattttttaccaaatgtaggttcttttggttgcacatatcttacaccacatttttcacactttaaaatatcatcatcatcagagttttcttttagtattctgagtacttttttaatattttcttccaatgaagctacgttttcaaatttaaactttgtaccaatactatcaaataaagacgcacttattgcctcataatttaatttatccacattctcctcaaatacattcctaataaaaggacaaaatacagatacttgccattcattacctaaatcaaacgtatatgagtcacctatattactttgatttttgatcttaaaaccattcgcaaataaaataccgctaactttttctttggaaaacatatgtatctccttaacgttaactatttatgggtaaattttactacaagctcattaaacatgccataaagtggttatgactcaatgataattttgttcatacactcaacaaaaataccacaccaaatattgatatttacaaaaaagacaattattaatcatagcaatacatataaaaaggagtttatatggaaaaacaaccagttataattcatgctgataaacgcagaaaaaaagaaattcagcattgtaaaaaacacactaattctgttttggatttaaatctcttctattcacctgagactaaaaaaacatttagtaaaaccatataacaagccaatattactaaaaaatgtaaaacataatgctaaatatcattagaaagtcagcttatttttttttgcattttcagaatgacgaatgatatatagctaataaaattttatttttcaaatttattttcaataaataaaaagatagcttatattgattatcagctattcaaataagatgaattattttttgaaaatgttattcaatacgagattttcttgtgcagtagtagaaagctggattgaatcatttaaaaagttaacaaacaaatcatggaatacttgtctttcgcttaaatttgtccaatcccaggataacgcttcttctattgagatccagacaatgagtactctatcttcttttaaataaatttaaaatcgctcgtctggtgttctaagtgcatgtgataatattttatttctgttatctgaattggagtcgctatcaataagccaaaaaggttgaagtaatgtgaagtcaatcagctagttgaaagcaagaccacagacttgtgccgcttgcatcgtgcttactactttatagtcgctgaacataacgaattgtgacatcagcaatttgttcctcacagcaataatcagtcagcagcctgattaccgaatagagcttgttcaagggtaaatattcggcatttttttctaggccatataacagtatgttaccttagcgttttctggcgcaccctctgggtaatctgcaaccagctttaagtgttcaacatcatactgtggaaaatgaactactattcgcgatagtatcttaggattcaagggttgagttagcccctctcgattcatcaatatgtgcctgtagccaattttcaacctcgctctttaaccagcgagagctacgccctagttttattggtttaggaaactctccatcttggatcaatttataaaaccatttatctgttagtccggttaaacgggttataaatttcatatcaacgcattggtcatctaataagggaatcgcttgagtgctcattattgaactcctgtctttaaagttaaaaggcagaagggatatcgataaatgtttagggatatctttcttccaaaagatatccccctcatgttttttattggtagattaacggctgcatccgaaagaacgctcaccatcaccataatattttgtatgttctttggctaagtaacgacagcgttggtttaattcgaatatcgtactttcattgttggcattattgttatctagccaagtaacagcgttatctgggatatgaactaaataacgctccgtagagtagttaacaccaattgcactacaccatgcctgctgtattaatgcatagagtgttccttcggtttttgtgtaatcacctaagccccaatagacgtccttattgactaatagcaataagtgataatgtttccgactactgatctcaccaaactctctcacccaaacataagataaggggcatgaataattacgagcccatactttatttttgcgtcttaggtctgcgcctattttggcttttagggattcaatgaaacgagttatgactgttgaatcctcatggtaacaagttgttgatgacgggaagcgtaaatctacgcgaatagctgtgacacgattattggtgaggagtgatttacggactgttcggtctatctgacgaagatagtcctcattgtaggtataactagacatgatttattccttaaggttttttaagtcatatctagttcgatggatgtaaaaaatagataagttagtcaagattgcttgagtgatctttaggtctataaaatgccattcttactctattaaatatataactataccagcaccgtttttacacacagaagccctgcttgtcagaggctcagtgactcatctcattaaaaagtactctgatattaattttctaacgcgaaatggataacagcgtcactttcacaatattagaattatttttttagtatgcttatcaataaaaacagcactattgtattagtataagcctaataatctatgtataaccctttaaaattaaggaatgaaagaacatgaatatcacgattaaatcatgaataaaaatgtgttttaattagctatttattggtggttttaatggttttttattaccgtataataaaataatcatcatattttaattgataaaaaaatgaggttttcatgacgatgaattattcatatatagagaacgaaatttatggttatatgagaaagaataaagttttttgttacctcatatggcgtgtgttgagcaacagcaaagacgctaatttttatatgtttaaaatacgaaactacttaacagatctcacagttaaggacgactttagtagtgttataaaaacagtaacgaacggtttttttgataagaaatttatttttgcaccgaagagtcatgaagggcgatatgtagaatctattgaatatattaactttgttgtagctaggcttaatgcttttcaatactcagattatgttactgatatatatagtatgcttgactacttaagaaatgacgtaattaagaaaacctgccattacaagtactttgattggttaaaaccatccgatataaaaatgtgcaagtgggtctataactatctggtcaaaagtaaagcattgactaaaaccgaatatcaggatagtgaagagctttatctttacattgtgactggtttttatttatggcaatcaccccaagatgaaaaagataagcgctataaaaaattactcctagctcgaaatgagcgaaaacacagaacaactactcaatcaaaaggttcggtaaggccaaaaaaaacaccgaaagatattcaactttcagcagaggcaagaactaaattgacagagttagcccttaactatggtgtacccgcgtcggagtggttaaatagcttcattattgatgaatatgaaaaaatgaaataaatttcaaatatatatcatctatgcgaacttaacatatattaaggttgcaacgatgaataaactcgaaaatcattttcttttcctccctaaaggggctaaggatgtgtttttatcccatttgaataaactcatcaactactcccccaccatcggcctgatgggtaaaaccggagcaggaaaatccagccttatcaacgctctattccaatcaaccctatcacctgtgagtgatgtatccggctgcacacgccaagctcaacgcttcagtatggtgatgaacaaccatacactcacctttgttgatttacccggtgtgggagaaagccttgagcgagatagagaataccaccagctctaccgtaacttattgccagaactggatttaatcatctgggtactcaaagccgatgatagggcatggtcttctgatgaacaatgttatcgctttctcactaagcaatgtggttatcaatctgaacgatttctgtttgtattgaaccaagctgacaaaatagagccctgtcgccagtgggatgaactgtaccaccaaccatcccgtgaacaagttgctaacttagaattaaagcaacaagctgtgataacagcatttaaaccgcatcatccagtgatgacggtttctgcggcagaaggttttcagctcactgaattagcagagcaattaatacaggcgttaccggcgaaagccagtagcggtgtggctaggcaactgaataacacttatcggacacaatccgtggaagactccgcatgtaacaattttgggcaatgtgttagtgatatcgtcgataccataatcaatatcattccattacccccattgataaaacatacgatcagcactgtcaaaaacagcatcgtttccgtcgctaaatccctgtggagcctattcttttaacctcctacgttaattaattattcatcactctcagcgccagtccttaacgggattggcgcttttttatttctttttattggagtctcaacttatgaataacacaactgaatccgccattgcaatgacactcgtccttgatgagcaacgccttgatttttggttcaaccattttggtgcagtaaaagattgggccacctttgaagtggtcatcttcaccacgatgggtcaattctgcgatgagtatcatggcggttactgggagtacggctcactcaataatggcggtgcctttatctaccccgatatcaacgcagacaccttaaccctattcaacatgcacaacggcaatgaagccaccgtgagccaagaagcggcagggattgccgtatgccttatcctgtacagcatctggtcattccaaacaaaaagcgaagtgatgtgcgaccgcttttatcaactgcgtgactatgccctacaacattctgaatccgctgccattttccatttaattgattaatcaggagttttatcatgagtttattagcgtctcgttttggctctgctaacagtattcgccgtgagcgtccactcactatcgaagagttattccgtactgtaccgagcgttttctccgaagataagcatgggtcacgcagtgaacgctatacttacattcccaccatcaccttgttagacagcctacaaaaagaaggcttttatccgttctttgcctgccagacccgagtgcgtgatgtcagccgtcgagagcacaccaagcatatgttgaggctgcggcgacatgaccaaattacgggcgtacaagtgcctgaaattattttgcttaatagccatgacggttcgagtagctaccagatgttgccgggactctttagagctgtatgctccaacggtttggtgtgcggtgatgtattaggtgaagtgcgtgtcccccataaaggggatgtggtggggaaagtgattgaaggggcatatgaggtactcgatacgtttgagcaagtggctgaaaaacgcgaaagtatgcagtcgttattgttacctccacccgcccagcaagcctttgctgaagcggctttgacctaccgctttggtgaagagttccagcccgtcacgcgagagcaagttctacagcctcgacgctttgaagataaaaaagaagacctttggacggtgtaccaacgtctacaagaaaacctgattaaaggaggattatcaggccgcactgcaaaaggtaaacgcgctcgtactcgttcggtgaatgggattgatggagatatcaaactcaataaagccctgtgggtgatggcggataccttatttaaccaactcgctcctcgccaacccaactaattttcccaccctgacaggttgtgtcgttacgccttactttcttatcgttcaaataaaaagcataactttatttatcaatgaattacttatagtgatttttcactaaaatgcccaatgataatttttcccaacagacataacctgtcaatcccctaagttaaactccctcacttcttaatttcctaacgtctgttattgagagtaatacgttatgtttcagattaaccgaaaatatgaccgcatggctgtgcgactctctgcgctgattgcccgcttaatggcaggagaaagccttgtgctctcatgtttagcccaagagttcaatgtttctgaacgcacgttacaacgggatttacgtgaacgcttggcttatctgggtgtagaaggttggcaaggttgttatcgcttgcccatcaatacgctaaaagcttaccgagacaaagatattctaacttttgtgaaacagattgggatgactcgattgtttccggggctagacagccgcttactgggattactgttaacccaacagccccatgcaccttgtttgatttggcatcatgcccataagatttcggctttgcatgccgaccatttctatcaattggtgtatgccattaccagtaagcaatctattagcttactcacgcctgagcgtcgttttaatccactacaaccttatcaactgatttaccgcgaaggccaatggtatttattggctgaatatcatcagcaagtgcatgtcttgttgttggaggatatccaacaggttcagccgctcaatatccctttcacaccgaaacatacagtgatgcagctgtcacaacaaaacagttttatcgcggcattaccgcattttagattgatatcacaagtacttaccgctcttccatcactcaaagaaaggagccgaccatgacgctattaaccccaccagcatcgcatcccacacattgccctcactgttcttctgaacaagacatcattgcatggggcacgggctggatgtgccgcgattgcggtcatgaatgggccatgcccattcaaaatcaccctcataccgtgaatttatcatcacataaggaagcttaaaaatatgaataccgtttcacacttacagttgggtttagaacggatcgctatcgttatcagtattttgttatgcctttggatcacgggcgtattgctaacacatttccagcttatcgcccttaccatgaacccgtatgggatcacattgatgtacttcgttttatatctcttggcgttggttatcccacaactcttggcgcaattaggcttgtgggttttgagcgcctttaaggggattgattataaaatccatttcaaccccaaattagttgccattatatctaccatcattatcggattagccctctctagcctactgatcatcatgtcatccggttggctatacggttttactgaaggtatcgccaccacgatattgctagttgatttgcttattgccagtggtattgctttttatcttcatcggcgaattcgtcactgggtttcagtgcgattaaaccgctagccataacattaaacatgatcagcaatttttgttgtggataccttattcaccattcacaagatagccaccgaatacgccatatcagggaaaaccaagcacccattagacggtgttcataaagcgtcaatctgacgtttctatttatgttgataggaatttataatgaaaagatatgtagttgtaactgtattggcctcactgtggttgatgacatcaccagcctctgccaccagccagccccctaaaaataccatttgggaatatagaggcgatggcggtaaaaccttatggcaagtgtgtggaagccagaatagtacttgtaggatgtgggctcaaccaaacattatgttgctgtactgaatcataaatctgcgtcaggttgtgcatttggtgatttttatatcgtggcaagaactgatggaaactggcaacaacgcgatacaggcacttgtagccctaacgcttatgtccaaaaaggaaccattaataatggtcagtactcctcggtcgatattggtgttggtgggacgattgtagcccgttaccccattgggtattggagtatgcaaaaagagttctcaggcaagaatcgaccgcgctggaaagaaaaagaccgtactaaaggtggactgcaaaccaatcaacaataaataacattctcgctgccgtcacttgcggtagcgaggacgataaaagataacaaaaggtaatgtaatgaataagataaaaagtgtatttgcgataggattattggcattcagtgcatttagtttggcttaagaacaacagcgttatgcaagcatcacacatacgagctcaaattttattaaccaatgctactgtggttattcatttaccctcgataatggcggcaaccatatggttctagaccacgcggagtttggtgcacttgaactcacgctgcgaatgaaagatgggcaaggaaaagtattaggggatacggtactggaagtagaaccttttggcgattctagcgcaacgcgtgccatgtttactggattggaaattccgtgtgaggatgttgctgagtttgaagtggttaaagcggtggaagatcaaaacggccgtaaggttgagttaccgttatcgatctttgaggctaataatccagagttggcgaagatgtcggtagctggggaaaataattttagttgtagtcatttaaaccctgagatttatacttcgaagtgattcagagcgcacttacttgttacggatattgtgccaaaatcatgtggtttgatgattgctgctttgctttcaagtaggtgctccacgttcactaacgaatactcagagcatgcagacaaactgctggctatatttctttcgaagaatgtggaatgcataccaatcccccgatataaaggagctggtaatgactgctatagatcagtttgctgctttgttagcaactgtatttgcgtcccaaatcaaacaggtaggcgactaattagatcttgcgacgagcgtattgaatccttattcgttacgctttcggatgcagaaccattcaaatcatttctaggaatgaggtcgtgtatggggctgcgaatgcttaccgcattaggtggtaaccatcgttgcttcaacagcgccgaagaaattcaatactacgttggtagcgcactcgccagtaatcaagtaaatcgataaaaattcttttgatacaatagtttacattgtgcgagtctcgttcgatagacgttcgtggaatgaacagcgatgatggttaatacatcatactgagctagactttactgttagggggcagatagaaaaaggaaaatcacatcaattaactatccgagatttggcgtttaaatagataaggatcatttatcgatgctggaaggccaaaacctagtacgacggaaaaaatatttgctggtactggaagcacgcaagttgcccttactgaagtcataaaagaaaacaattaagatatcgaaagttattgtacgttaagatgatcatgtggacgtgttgaagtcatgatggatgttgaacaactgccctacaggaatacggattagataaaaacgtcacttcccgagatcctctaagcagaaatagtatttgcagtattcctaattttccgatgtttactaccgggaacgaagtagttcgtcgttccagcaaccagtcaccgctgcagctgcaaaagccagaaatatgcccatcaaacaatcagaataaaaaaccaaaaaatagtaatcgcgacaaatttatgacttaataatgaggttgcaccaataacttattgatattaaaaaaattagtgaatatcttttttaaaagagagtttactatgttatgtttgtaattattaattgcgcagtgtgacaacgatactatgacactcatctcccttttaaagcgtgaaggcccctgccttagttcaacgctggcgaatctgctgattcaaagcaaaaatatctctgctgaaaatgcgaggaaggttatctcacgggctgtcttggctggtgagataagtagcattaaaaacgtattcccaaagagggagcagtttgtatatctcaggaattcctatggtagcgatgagttttggcaggtattgaccgataagctaatagagagtggttcagcactgggtcttgctttgagcgcccttctggccagaggcggaatcattcctaaacgtgattttggtgctgcaagcggctcacctgtagctatgaagaaaaaaattccgttcagtatagtgtggcaaaggttggtgaaaatcggtttatgtattgaaattattcttcctgaaattggagaatgcatcgcactcagagaaaaagatgaaaggcggtatgacttcgtttcgagacaaatacacgcacgtctggtgacagagagcattttcatcacgacgatggttcagtggagtcagaacctcaatctgatcagctataacctggcaaggacgaggcaggatgaagaaggaaagtcacctgctatttcaaactatctgttcgatttaacaggtcccagctatctgtctcctcttgttacacgagggagcgatgcaaacaaaccaggtttttttgcctgtgacgttctgctggggaccaaagtcaccctggcccaagtacagccctttatagctaaatgtaaatcgctgaggagtataagaaacataggaaaaagtctttttatgctggccgccagtcagttcgacaaagatgcgtttcatgctctgaagaaggaaggcattatccccgctacacctgaaaatctgttcggtgaagagtttgcaaagtcactgcgtgaattgaacgattttttgttttattacttcacaaattccagctcgaatctggaaagaattgattctattatggttgcactaacgaatgttaaaggtgcagctgcacagctgcagggagcgctcttcgaatatcttgttgctgaagtgatgaaacatgaaggtatcgttgagataggaaaagttttccgttctgctgatggtaaaaaagcagaaagtgatgtgttcatcgctaagggatatcaggaagtaaggttcattgaatgcaaaggttataaaccctattcctttgtcaagcatgaagacgttaagcattggataggagatcaggtacctgtattcttcgatgccgccaaaaaagagaagccagaagctgacatttatgtagaattttggaccacagggaaactgagcgaagacagccagttatcactaaaaaaattctgtgacaataactcagtcaggaaacgctataaaataaaagtgctggaagctcacgatgttaaaaaaagattccatgcgaccagaaataaaagccttattaatgtttatgaaaaacattttgcagaacctttctacaaagagaaagatatggatgacgtcaggggaagttatcgtcttgcaggagggccacaattatacttcgaagatgaagaaaactgagatgttatttttaaattgttcttttgggattcatgaaataatacgtatgtgcattaaaggacgtttctatggaatttgtgctcaattgttcaggtcgggttaatgcctttagtaaaggctttggtttaccgcagactatcgtcatccttatccgcaaactgaaactgtgctgaatatttttcatctgtggctggatacctaacctgtcgacaggcgcgccagcatgaagctactctgccaacctttacatcatagttacataaagggtacagatgtcatttgaatgtcttcttcgctgaatgtagatctgaatttattgatggcattgcacagtaagtcttcggtgttagcataacctcggctgtaccgaccagattttgagttgatatagtatttgccgtcttttaataaaagttcgccggcaatacgggcaggtttaaagcctgttaggcagggatgtccctgattatcagactcaatgcccattagcaatgcgccgtcatgggcgatagcccagagaagttacggatggccctctttgtttactggagccgtattcatgaacgctgataatgtgatgttagccacgctatagaattttctgacgtaagcattgtccgtgataccatctgcattaaactcttctgccttgaggtatttaggagtacgtagttttccgtaggtatgatcaagccacacttcaatgttgatgttttttgtattgtgtatgtcaatgctggtcttttattctcttctcaagaaaaactgtattagttactatctctttttattttttcggactagctaccaataaagttcagattaacttttttaatattcgagaaggagagaatatattgatgttacacagacactaatatctgataacttatacagaaccaccagcatcacaattatctgtattagataaccatcaaaaaaagtaagaatttcatctgttggtacatgtgttggtataaataaatttatacttctatattttaatttagatcatgaggttaagtgttatgtacgagtccggccttcgcaccataagaacatcgagggacgtcaacggacgtctttttttgtatctgaaatccctgttttacaaggcttttccccactttttagtcttcccaagtatactaaggtcaaccttgcgtccctttaagccgacaaaccagtgagatcttaaaacaggtctatcaattctgtggtaatcattcgctagtctttatcgataatgacaatccgagagaaaacatggtaaacagtgcattacgtgtaatgggctatgatattaagacagaagtctgtgatcatggttttagaacgatggcatgtagttcgttgattgagtctggcttgtggtcgaaagatacagtagaaaggcaaatgagccaccaatagcgcaactcagtgagggctgcttatattcataaagctgagcatattgaggaaaggcggttgatggtgcagtgggaagctgattatttgggtgtgaatagggagaggctgtggaggcgtttgggtttgggaagtaatccttatatctctttatgatattacatatattgagtaataacataataggttaatttctataacatattcatttttatattgaaaaatggatattttaaaagctaacagatttgtttttaagtggaatatttaacttaaaaattatgatatattagattttatgtagtatatggcctactttttgtaaaatgagcttatagagccacaatttttagtacgtaaattgtgtattaattataaaaaaacatgttccataattgggaacatgttgatagtttatcattatgcatctataatgttcccaagttaggaactaaatctatggcaatgcgtttactcggacgagataaactagaaaaacttgtggatatagaaccttcatgtaaacgttggagcgatttgtggtcaacagaaatcgctaagagctactggaaatcaaaagaagaagtagaaaaacaatttccaacagttatcaatcttaaagataaagtttatttatttcaggtaagcaatactaattttaaggtggaaacaattatagatttcagtaaattagtagttcttattacctcaataaagggtaatgttgatgaatattaaagttatccgtacggaaactcaacataaagaatatctagagcgcatatattccttactgtcaatgatgccaactctaaactctagcgaaaatgatgaactggaattacttattactctggttgaatcctatgaaaattctaaatatcctattgagccgccagacccaattgatgctattactttccgtatgcatgaaaaaggtcttaagcaggtagatttggttccttatttgggaactaaaagtagagtttctgaaatattatcacggaaaagaccattaacagtacctatgataaaggcattgtcgattggtttgggaatttcaactgatacgcttgttggtatatatagtgaacaggcgaaaaagaatactgaaaatgttgattggtcaaaatttcctgtaaaagaaatgataggaagagggtggatatcaaatagtgttgataaaataaaaaaatcaacggaagatttagttaaagactttattaatcagacagcatggtctaccggaactgttgcatttaaaagaaccctttcgggggatgcgtactcaccttcaacaaaatatgcattatatgcttgggttagtagagttgttcaaagagcacgagaaaaaaaaccttcacttggaaatttcgatccaacgacactctctactaattttctgagggatttagctcagttaagttggtttgaaacagggcccttattagctatagaatttctagagaaacatggtattgcagttattattgaacctagcttaaaaggaactaggattgatggtgcagctttaaaggatgtagatggtttacctattattggattatctttaaggtatgatcgtctcgataacttctggtttaccttacttcatgaagtatctcatatttggaagcatgttcattctagtgagacatttttagatgatattgatgttacttcaaatgataaaagagaatccgaggcaaacagattagctagagaggcatttatacctagagctgtttggaaaagaagtgatgcatattcttcaccatcaaaagaaacaattgataatttatccagagaactgaagattaatcctgcaataatagcaggaagaattagacgagaaagtggtaactatcgtttgtttaatgaactgataggtcaaggagaggttagcaagattttagaatcaatcaaagtaaattagtctttaggagaacaaactatgtaccctacgtatgtaccaattcttagagcaaaaacaggcgagtttgatgcaattaaaaatctaaaaggtaaatatgcaagtgcaatttgccctttttttgaaatacctagaattactgaagatacaaaaaaattgaaagatcttagagaatcatctcagttaactaaagattatctaaaattaatagcaaatggaatttccagtgctaattcatcgccatcattattttttgatttttttgattggaaagctgatagttatactgaaactggtgagcatatccttagctatatgtatagagcattaactaagaaaggaataacagtttatccagtaattggttttgatcgatgggatatcttggattaccaaaaggcattagtaggattggatgtaagtgttgaaacaatttattgtttgcgtattgactcagtatcaattgatgatgcaaatgatactaactatttcactgaaatgcttgatgaaatcttgaatactcttggattatcaccttctcaagtaataataatgtttgattttggagatgtaaaaaataaatcaatagtttcaattagtaatgacttaacaaatttactgaatataacaaaaaattttaattttaggaatgtaatgcttgctgggtgctcatttcctatcataattaatgacgcagttaaagacactgattctacagattttgtagtacgtaaagaaatgcatgtatggaagtccatatattctgatttggcatccactataatattttctgattatggtataagaaatccaaaaggtggggatggaattaaagcagtacatgccaatgggaaaattcgttatacaatagagaataaatattttgttgctcgaggccattcaaaacagcaaggtaataaaggtgcacaaatgtatgatcttgctcgcatggtagtaaactcaccttattttttaggagctagctttagttggggtgatgaacaaattgaaaaatgtagtaatatgttaataaaagggaatcctacacaatggattagttttgatactaatcatcatatttcgtatgtaattgaagaagtattagagttccaacgtaattacatcggttcccgtaaactggataagttattagttaaataactgtcatgggatgttaaataaattattggaattgattctatagctaatcgaagaatagcgtatgcatattttgatcctaaatggataaaaaaagagcatagcgtgcttaaactaattagaaatgaagttgagccacttgattatagtttagatatgaaagggtatctaatttgcccgcaatattatgaaccattaattagggtaccagcgggcccttcaatttcaatgatatctaatagtagagatgctttattctggcatttaccggaccaagatgtaccgttctgtttactaaaaagtggtacaatatttggaaaacgttattcatcagaagaggaagcaaagaaggctgtcgaagatgaagaattaattattatcgatggatttaagcaagaacggtctgaaaataaaaattatgatgattttgatagtggcgagtcagaatatgaaagtagcctagaaagtagcgatggtaggttggtagatatacctgtttctagattcaatggataatcttttaaactaccaagcagagtgactagcgtatagtcattatgtgctaattttaggcaaaattattatcgagaaatatttgttgtaaataaatcgggaaacgtactacgttatttattttgtgattcattgaaaaatattaatgatatagatgatgaagttaatgttgaaaatttttattttggtgagatagaatctattgataagcatacaaaatatttgactatatggctaaaattaaggcaacccaaaaggtacgctgattttagagtgtgggtttggaatgaagttgccgtaccacgaggtataattgagggtaaggttgaagggcgtattgttgtattttatgcatccataagttcagtaggaacagggttctggacaaaggaactaaattgggggcaaatagctgtattacccaaaaaatattctgatttttaatcaatgactataaaactaaaaatagttaacgttattataaaatattaaatataatcttaaattactaataaattattaaagaaataaatgtattaactttatttaattaggttagctaactcttctatttccttgtctaactcattgattttaagtgctattttattaaaatgtttcatttgtatatatagaaatctatctttttctatttttgaaaatttatcttttacataatctgctaattttgaactaatatttaaattatgtttttttgtgtaataaatagtatttaaaatacatagttctggtaatggattttcttccaaaacgatatctaatgttttactatctagaaaaagttggaagctactgtcatcattttcaatgaattttttattttgaaaatcaaagagaatagatgaacaattaaaaaaaacagtttgaggtagaatatctattatattagtagtgtttctatttttttgtgggatattttttaacccccatgttaagttagcttgccaaacatcaatgttaatgtcgttaaagtataattttaagccaccaaatgagtttttcttatattgtattttatttttaaatattgaatgaaatttatcaatgtcagatacaacaatatcaatatctcttacgttaaaatttgatgatttatctttatataaaaaataatctctaatgatgccactaaagagaaaaacatcatttttttcctccaacagcacgttgattatttgcttggcgaatttagggaacctatccgctaggtaatcattaaacgtatttgcttgagtattaatgatgtctttcttcataatatttaaattttttgtccactaagtttttgataatgattaattgcaaacaaatctgtcataccagaaacgaaatctacaattaattttagcttaaaatatgctgataaatcaactatatgaaggtcggaaatatctatttttttatccgattcttttatatattcctgtttaacaacattaactaaacttgatgatatcattgattcagctttacttgcatatttttcttttatttttttgattgcatcatggtctttttctttatcaaaacctttaggttcataaaataataaatcaatataataattgaataaaccttttaagacagcatctccagctaactctaaagaaacgatttctctatatgggaaaattatattacaagcaatgcttcgtaatgtttctgttaattcagttagttcaccatcttcaattaactctttattatattcccccatttcaattttatctaaattatggatgaaattttcaagtgatttttcaacaaaaatacctatcaaataagttcttatttcaactatttttttattttctgagcttttcttgttatcgagtatgactttaatatgttcagtgactttgttcattaaagtcggagagtttttattttcggttttttgaagttttttttcaaagtgttcaaagatattattaagggtcattatacctttgttaaatgcatcttctatatcaataacagaataacaaatagaatcagcggcctccattaaataacttaaagggtgacgcaaaggttttttatatttatccattaagccacaatgattatatatttcttctaggtattctttttctgagtgaaagacacccgttttctttgtttctattttcccttttttaggggatgctgaatttggatattttaaataagaggctagtgttgaaaaagtcaaattaagtccatataaatcatcgagagcctgaagtttcgttataactcggaatccttgcgcattaccatcaaaatttataaagtcatttttctgttcattggatattttactagagagttcatatttattatcttcaaataatgctctgaaatagttttgtatcacagtttcaccaaagtgaccaaaaggagggtttccaatatcgtgtagtaaacaactactttttaatatcactgggataattctgtaggtatttttatcaaaaatatcacttattgatctaattttatcttggatttttttattattacaggcaccaattcctagtgaataccctacagacattacttccatagagtgagttagccttgtatgtatattatcatttgtatttaatggaaaaacctgagttttatcatgcattcttcgtaacgctggactaaatatgactcgacctaagtcactttcatattgatttctatcattttctaaattaaaagataaacttgaagaacgcaacctatttgctgataacagtttttcccaattcattactgaattccttttgtgtaatatgttgtgatattatagtgcatcttgacctttttgtaactttactcttttcgttatagagagtcacgatgagtttataagtttacccatagataatggtttgtttttaatgattattaaagtctttatttacagttgatgcgttatgaatatatccaatcaatttatattgagggtataaaaataatatttcaaaatatatagtttaaatttcatgttgttagacttgttttacgagtccggccttcgcaccataagaacatcaatggacgtctttttttttatctgaaatccaatgtttacaaggcttttccccatttttcagtcttcccaagtatactaaggtcaaacctacgcccctttaagccgacaaaccattgatatcttaaaacaggtctattaattctgtggtaatcattcgctagtctttatcgataatgacaatccgagagaaaacacggtaaacaatgcattacgtgtagtgggctatgatattaagaccgaagtctgtgaacatggttttagaacaatggtctgtagttcattggttgagtcaggcttgtggtcaaaagatacagtagaaaggcaaatgcgtcattgcccacttcccctaaaatgacacagctataattaaattttgccccaaaatttcagagaccataatgaaaaaagttcgttttgctaaaactcaaattgtgaatatcttaaagctcgcagattcaggtatggcagttgacgatatttgctaccaaaataggatcagcaatggcatatactaaatttgaaaataaaactatggcgctatgtaattcattaaggttaaccattaaaattgcttgaagagaaaataataatcttaaaaatatttgtagaagtcagcctctaacaccatgcaataaaagagtctttcgcaaaaaaggttgatatggtcattagattttatatatcaccgtttgtattgtaataaccgagccaagatacagtctcttcttgataagagagttgtaaatattgagtgatattggtaaacacttaacatcaactcgctaattctatagcttaaacacttgctctaccatttgattaccattcacaccgctagaaactaataatttcatattatcatcaatactgattgcgcccatatcaaaggcagagtggtgtaatgcgcataatgccaacccattattgatagtacatgggccgccgaattgcttccattttatccaaagcaccgtaaaaccccgtccttcaggtcggggatataagggcgcggttttttaactaacgaggtgtttcctgttgctcaatatactggcggataatggatattgctgcgccaccacaactccccgcgaaataactcggcgaccaaagaacccctttgtagtaatcacgttgggcaatatcaggacgattacgtcgaggtaatcgactcgatacccctttaaggctgttaaccagattagatatcgccagttttggcgggtaattaatcagtaaatgaacgtgatcccgttccccatccatttcaaccagttcaacatcaaaatcagcacaaacactggcaaagtagcctcgcaatttttcaatggcatcctgatcaaatatttttcgccggtattttgtgacaaagaccaaatggacgtgcatcaggaatacacaatgtctgccaaggcgaatattagtttcattttttatagaccaaagtataatagataatatgaaacgtctacaagcctttaaattccagttaagacccaatggtcagcaagagcgtgagatgagacgctttgcaggggcttgtcgttttgttttcaatcgggcattagcacgtcagaatgagaattacgaagcagggaataaatacattccctatacaaaaatggcttcatggctcattgagtggaaatctgacacagagacacaatggttgaaggaagccccatcacaaccgtcacttaaagatttggaacgggcttacaagaattttttccagcagcgtaccgcttttcctcgattcaagaaacgcggtaaaaatgacgcttttcgctacccgcagggcgtgaagctcgatcaatccaatagtcgtatatcattgccaaagttgggatggatgcgctaccgcaacagtcgtgaagtcgtcggagaagtgagaaacgtcacggtcagtcagtcatgcggtaaatggtacgtcagcattcagactgagtatgaagcgacagaaccacaacctgaatcaacctcaatagtcgggcttgatgcaggcgttacaaaactagccacgctttcagacggtacggtatacccgcccgtcagcagttttaaagtcaaccagcgaaagctggcaaggcttcaacggaagttaagccgtaaaatcaaattcagtgccaactggcaaaaacaaaagcgcaaaattcaacgtctgcattctcatattgccaatatcaggaaagactaccttcacaaagtcaccagcgaaatcagcaaaaaccacgcaatgattgtcattgaggacttaaaggtcagtaacatgtctaaatcggcaaaaggtacgacagaacggcatggacggaacgtaaaagctaaatctggtttaaaccgctcaatactggagcagggctggtatgaaatgcgccgtcagcttgagtacaagcagctctggcgaggtggtcaggtactggcaataccccctgcctacaccagtcagaagtgtgcttgctgtggacatacagcaaaggaaaaccgccagtcacaaagtcaattcgagtgccttgaatgtggatatacagcgaatgctgatatcaacggggcacgtaacattttagcggcaggacatgccgtgcttgcctgtggagggagggtgcagtcagaccgcccgtcgaagcaggaacccgccgaggtgattcagatatcagtctgaacgcagtagggatccacgtcctttagggcgtggaggatgtcaaatgagcggcttctaggccaaccacggcgctatcataacgtagattataaccacatatagcacactgataattgtaagcacgtaagatattttttctaaaagtgggatctcggttttggcgaatttcttgtagtggaaaatcaagacggttagcaataacttcttgtacattatcagggaagtgttcacttaaaatctgttgtgctagcttattgattaaacttggcttttttataagaagctgatagctttcttggccaaatccacttaacacattttgctgaattaatttatttttcgatggttgcttattatcttttgatagatcgctctcttttggtagttgcaactcccaaaaaccatcgcgaactaatcgccagaaaggcagatttggataatgctcacggcgagatgggccaaaattaatcaataattctaataactgttgatgaatttcattaccataattaaatagtcgtggatggcctttgcggtactcggaaagcgctaataagagtaacagtggtttatggggcgctctgttatcacctttacgccagatcgtgatattagaattttctgttgtaggattttttgagtatacatgggtattttagataataagtgaatggctgaatgatagcgaatgcgaaagtttattaatatagtcgtataaaatcttattttatagaagaagtacagaaatatgtttaattattcatatctgttataataacattgttttttaatttctttgcaacatcttgatacttaacgtaacaatagtgattttaatgtctcaaacatcttcctcactctattaaatacaatataaaaataaaatggtaaaacatcctctaatcgctcattttttttgattttactattaaaaatggttttatctttattttaaagattctaataggtaaatctgttttattatagaataacaaccattcttacattttgtactatttttagtcgtatttaaaaaaaagcaaataatagactcaaaatatctataagtaaaaatagctaattattctattctttgaaatgcttataagaaagcatttttatgctatggtaatattataagtaatatcatatttgatatatttttataaatatagttattggtggagattatttttatctttaaatttaaaatatatttttatttatacatgcaagtattaattttttaacattacattaactgtaaattaggcttttgtttagataataatctttattaaggtaaattattaaaatttaatacttaaaaaacgcatttataggtatatctatctaagtattgttactaccgatcaatgcttgttttttgatagctgttggctatcgtaatctttttattgatcgtttttatcaatttgtactagaatcatcattagggttacctgtcattgaggggcgtatatgatgatcaatacagtggtagggaaaagaatacaaaatagaagaaaagaattaaatatatcaagttcgaaaattgcattacagttagggatgacagagcaatattatctaaaattagaaaatggttatactaagataaccgttgatgaattaatatgtattgcgattattttgaaagtgtcaccacaaagtttattactaaaatcaactgttagtcagcaaaatagggatagccaattaaataattattatcactaataatattatcacaatagtgctttgttaaaaaatactcatatagtagtagtttattgagtaatatagtaatgataagaaattacttttaggcatctttgatattaaaatataagtatatatctttattgaacgttataaatcaataattgatgatgcatatttgatcgttttaaaatgttttctattactactctatagtgttaatgctttgtttttatagtataaaatcaggtctaatgttaaatgaaatagtaattaaaagtcgtgatagatggctaatcgtcactaaagtgaattaataataaccctctatcttatactgatggcatttaacatcgctgatgcgtttttattttcgctatctactaagatgtataaccgatcttattatttaggatcacagtgatggtttaattattagatttattagtcagttaagccacgatttaataacgtggctttagttttatatgagttatttcgttattggtaaaaactcacgtccataaaaacaatgagttgcattaccacggatcactcggtgatgagctaggtgtcgctggttattaaatgaagcttgctgttgggatagataatgagttagatgccaagcaataagctgtttcgctaattttttattagcatgttggattcgctgagactggatcttgacgctaatgcctgttgcaatatgcgtcgctctgacagctgaactcgttttattaacatgttgtcctccggggccattggcacgcatggtttcaaataaaatttcggtgtcttggatttcttgtggtgggtcaaaataagcgataccgataaaccaatttttgcgtttatgtttaggtcttaaagtacttgtacattgccattgcactgtgcctgaccattgttgtgcgatagctttagcctctgcacctttaagcgatactaatactgactttaaaccataacgagatggctcttgctcaagaattatcacatcaacttgccgctgctctgtgacggttagaaaataattcaatgttttttctaccgctatacagcattcttcggggccttgtgctgaagaaaattgtaataacattatgctatctccccactggttttataagtaataaccggttttaagcgggcgataacctcaattaaaccaagactcctcatactttctataacagtttcaattgatttatacgattgaggcgcttcctcataaattaattgtttattagcacaaataatacggctacctagtgctgtgcgtgagagctgtaatggcgtaaatcgatgtgataaacggcctttacactccgttcgcatccactttctacccgcaccatgtggtagagaatgaaggcttaattcagagataataggcttaacgagataactgtgatcaccacgtgaaccaggaataaccacaatttcgtgatgagcgggcgtcgcccctttgcgatgtaaccatccttgttgattatataattcgcaaggctctaccagattatggttaacatcagtaataaccgttccttgtgtatgaatttgttccatcattctatggccaatcaagtggcgattgagcttagcataattaagagcatggtcatgggcttgtaagtagtcattggcagcgtctgtattcgcgaccaatccttgatggccaaattgctctgtgtgagcacgtaaaatagattgccctaaaccacgtgaaccactatgcaccaatagcaataattgttttttattaataccactgtttgtaaacaatgcttgattaataacttggtcaatttgttggaattcagcaaagtgatttccaccaccaatagagcctaatgagtgagcaaatggatgattttgcatatctgcaggtaaattatctatcaaccattcgatgggcgcgatatcactcatttcgctcaattttttttctattttatctaaattgagtttgctatggttaaattctgtttgaaacagtgtcataccacagccaatgtcattaccgactaaagcagggtaaaaacggttaacagaaaaaaaaaccgctccaatgggataaccacgaccgggatgtaagtctggcatgccagtgacataagccatttcaggaagttgagcggttgttactagttgttggattgctttactttcaatccaagttttatctgaggcgatataacaaacgcgatcagataaataatgaacacacttgtccatattccaatccatatattgtaaaggataaaaaataacgtgattggcggacagtaaaaagaaaggattacttttgagattgtccgcaaagagtattcatatttgttgttgtcatgggatacctccttgcagttctgtgaaatggaaaataataaatcaggcgaatagtaatcactttttttcactttagcaattaaaaaagtagcgtgatttttctttctgtttaccaaaaaaagtaaattagggaacagtgagatttttcttttgggttaataaataattttaactgagctttttcggcaataggcttcgtaatcatctgttaattttctatcggtgatcacgacatcaaattgcgctaaatcgcccatattgcctgtggcagtttcatcgaaggcatggtatttggtgagtaagatcttgcgaatcgatttatccatcgcttttcttttcatatgaagatcatcaatgttgtagcaagagacaccaaaatcgaggtggacaccctctgcggaaataaaggcttttttcgggtttatgttatcaaggtaacaaggctggaggggattataaaatgagtcgcttttagggcgatattcgccaccacacagtagtacggtcgcatttttctttcggcttaatgccaggaaaacgcggtgcgaataacaaataccagtaaagtgtaaactctcaggaataagctcaattaatgtcggaataagttggccattatcaaaaaatagtacatcaccttcagacaccatgcccgcagcaagattaggaatgtgtaattcttgggtttgatccggggtgataatatcactagtcgatgtgattaggttgctatgaggttgtgccaacgcgacaatatagccaccaagcagtgacatcggataggggttttcaacatctgaactgagatcacgacgaatggtcatttcagatacttcaaggatcctcgcggcatctttgagatggatgcggcctgagcgttttatgcattcgctaaggcgacgcaaacgttcatgctgtttggtctctatcacctaaggatccttctattatcgaatagcgtatcccatataacgatacgctaggctattagtaatttgattctggtgcatctgaatctgttacaatcgcaacactggcacttgcaccaatacgtgttgcccccgctttgatcatctttaaggctgtttggcgatcacgtacaccacctgacgcttttacgcccattttgtcaccgacagtttgacgcattaaagcgacatggtgttctgtggcacccattgtactgtatccagttgatgttttaacaaaatcaacaccgacttcgcaacacatttcacaaactaaacgtacttcgtcgtcagttaataggcatgtttctagaataacttttagtgttgtatttccgcaagcggcttttaccgcggcaatatcttgttttacaaaatcaaaacgaccactttttaacatgccaatgttgataaccatatcgacttcttgagcaccttggcgaatagcttctgccgcttcaaatgctttggttgctgttaggcctgcaccaaatgggaagtcgataacacagcatactttaacatcacttccggttaggcaagttcttgctaaagggatataagaagtgttaatacacacagagaagaaaccgtgttcaacagcttcagcacataattgtttgatttgtgcttcagttgtatctgcagcaagtagagtatgatcgatataattagctaatggacgcataatcgtttccttaagagaagattgttatttatcactcatgttagtttggcaacataatagtgagcttttaacgggataacaatcacaaatgatatttaaataacatgatattgttatatatctatctaaatgtaactattctaacattttaactttttcattagggtgagaggggcactatggatatcgcagtgattggttcaaatatggtggatttgatcacctatatagataggatgccaaaagagggagaaacccttgaggcgccagcatttaagattggttgcggcgggaaaggggcaaatcaagcggttgccgctgcaaaattaaattctaaggtgatgatgttaaccaaagtgggagatgatattttcgcagataacaccatcatgaatttagagtcttatggtattaatactcgttatgttgaaaaagtgcccggaaccaccagcggtgttgcacctatttttgttacctctcaatcatccaatagtattttgatcgtaaaaggcgcgaatcagcatctatctgctgaagatatcgatagagccgcggtgagtttaaaaaaatgtcgtatgattgtgctgcaattagaaatcccgcttgaaacggtctatcacgcgattgagttcggtaataaacatcatattccagtattgtttaaccctgcaccagcatcgaaagctttagatctcactatcgccgcacaatgtgatttttttgtccccaatgagacagagctggaaattttaacgggtatgccaattaatacgttggatgaaattcgagaagcagcctactttttactcgaaaaagggtttaaaaatatcattgttacattaggtgaaaaaggggcgttatgggtgaatggggaaattgagaaatatatccccgccattgaagttaatgccgttgataccagcggtgctggagatgcttttattggctgtttttctcattactatgtgcataccggcaatattgaagaagcgttaaataaagcggttatgttttcgggtttaagtgtcacaggaaaaggcactcaatcttcttatcctagtattgaagaatttagcgaatttttaagctcagcaaaatagccatcaatgagccatacctctcacagctctcctgtttaaaatcaggagagctttattatcaataagttatcttttttacatcgcgttaagtttgtttttagttgaatgtttttacggtattgtgattttgttcacaaaatagtcatcaataagattgaattaaaatttcattatatgtaattttaattgaaatactatttcattaaggttattacaatgaaagatgatgcattgagtttatgtcttcaaaatgaaagtaaccaagagaccacacaattttctgagctaagtaccttagcgttagtttcgttaattaatagtgccgatatcaccgtggcctatgccgtaaagaaagaattacccgcaatcgcgaaagccgtagacaaaatttgtgaacgtctacgtcaagggggacgcattttttatgtcggcgcaggaacaagtggccgattagcggtattagatagcgcggaatgtccgcctacttttggcgtttctccctcactggtacaagccattattgctggtgggcatgatgctatgcttcaagccgttgagaatattgaagataatcaacaagctgctatcgaagagttgcaacgccgtgaggtaaattctaacgatgtcgttattggtatcgctgccagtggtcgcacgccatttacagtggctgcattacagtatgcaaagcagatcaatgcattaacgctctcaattactacccgcggtaaaggtatgatgagtgaaatagccgatttatccatcgcgccagatgtcggcgccgaagtgttaacaggctcgacaagaatgaaaagtggcacggctcaaaaaatgatcttaggtatgctaagtaccagtgtaatgactcgtttaggtaaggtgcataaaaacctgatggtcgatgtcgtggccagtaatgaaaaattacagcgacgtgctgaaggtattgtgagtgaagtgtgtgggatcacaacacaaaaagcagcggagttattaaaaatggttaattatcatccgcgaaaagccattttaatgtatgagcttcatctgagtgtagagaaggttgagcaaatgacacaacgctatccttaccactctttacaacaacagttagctctatttaatgaataacaatatcagtcaatcctctgaactctagcaggcacaattatggctaataaaatagaacatctcgacaccttagcatcagaaatagaaaaacaggctggtgggtttagcaatatcgcaaccttaacacattgcatgacccgtattcgtttgatcttaaaagatagttcgctatttaataccgaagcattaaaacaagtcgaaggtgtcaaaggcgtggtatttaatggcgagcaacatcaagtcatagtaggaatgggaacggccgccaaagtttattcaatcatgaataaacgtatgcaaaaaaacacagataatagcgaagaagcccctgcgtcaacaccagtgaaaaaagggttttccatacgccgtatgctaaatacgttggcggctatttttgttcctactatcccagcattaattggctgtggtttaattatggggctaattaatattattcgtttagtggcacccggcttagttgatcagtttcctgaactctttaagctatttaaactgatcggaagtaccgtatttgcttatctctctattatgataggtataaatacggctaaagagttaggggcttcaacctccataggtgctgttatggcgggattattagccatgccgggactggctgatatcacattatttggtgagaaattacagcctaatagtggtgggatcttcgcggtcttaatggtggtggtattttcttcaaaattagaactatggtttcgcagtattgtaaaagagagtcttgatcttattttaaccccctttgtcactattttagtttctgcgttagtggcaattatggtattccaacctataggtcattatctgaatcaactattagcgcaaggcgtatccttatcactattaaatcatggtggcggtgcggttgtgacaggcgcagcgttagggggcagtttcttattcttattactaaccggtctacaccaaggtttaataccgatccacactgaaattttaaatacctttgggttaaattacctattccctattttagcaatgggcggaatggggcaagtaggctcttgtttctgggtttatttacgtactaaaaaccaacgcttaaagaaaacgttaatgggtgcgttgcctgtcggaattttcggcgtgggtgagcctttattatttggtgtctctttacctttaggtaagccctttattgcaggttgtattggcggggctgcgggtggtgcattaatggcttattttcaggttgggatcattattccatttggtactgctgggttatcattaattccactggtgggggatgggcagatcatcaaattccttatcgcagtattgggggcttgggttgtcggttttattgccagtatattaatcggatttaccgatccagaaaaataagtcagaagaagaaaagaaaaaggataatagaatgtcaacactgactaagaaacttgaaaatttgcgcttacaaggcaaagggacagagcaacgtctcgcccactatttattagaaaatagcgataatattgccagtatgaatgccgcagaattggcacaaaaagccggtgtcagtagtgcttctgttatccgtttttcccgccaaatggggtatggcggttatcctgaatttaaaattgattatctctcagaggaaaaacaacaaaaaagcagtagtgatattctttatgccaatttagccaaaacagactcgactgagcagattattgctaaaacaggacatctatttactaccgccattcaggattcgatagcgttactggatgcggcgacgatagatttactcgctgagaaaatgatcagcgctaaacggatcgttttatttggtgtgggcgcatctgcgatcgttgcgagcgatatcttccataaactgatccgagtgaataaaaacaccttatttagtgcagatctccatgcgcaacttgcttattcagcgaatttatccgcggatgatttggcgattgctgttactgcaagaggcaatactgcggatattaatcgaatgctgaaagcggcaaaacaagaaggctgtatcacagtggctttaacacgttttgggcaagatgaagctacgcgcttagcgaattacacattaccttatttttatgatgagcaacattcacaattgggggtgatcacaccgcaagtattgcaaatggtcgcttttgatgtgctgttttttaaatatatgacactggcaaaaggctcagcggaaaaagcgctattaaaagggcgacaagctgtaatgcaaggaaatcaataatgttatttatcaccatattagctgttggtgcggcgattggcttaattattagcacaacgggggtaggtggtggtgttattgttttacctatattaacgtatttctttggtatgaatgcattaatggcggtggcaaccgcaaatttactttcaatgttgatgaaagtgacatcctcatatatgcatttccgtttggggaatattccctttaaacgagccatgatagtcctcggcattatgttgccaagtacttttttagcgagtttactcgtcaattatttaggttcattaacgcaatatcagcagcaagttgagtgggggattaatgcgctggtggtggctgccattattttttctctctttttgtttattcaaagaatgtttttttcttcacctgtgatagctaaacagataaccccattagcgcctcttaatattaaggcactgttattgccggcgattgcagcaggtgttgttttaggtgccacaggggtcggtggtggtgtggtggtgttacctttattattgcgttacgccaatctatcgataaaacaagcgataggtacttcgatttttacgaccactctattatcaggctcttctgcattggcttatatgcaagatggccataccgatatccatttagcattgttgctgtttcttggctctttgatctctattcctctatcaaaatggctattgattaaaatgccggatagggtatttcagtatgcaacgttgtttttaattttatgcagcgctttcatgatgttggcgagattgttttaactgatagccatactatggcattgcgtcgattctttattcttggttggtgtttttttctggttttttatgctgttacaacacggagttactacttggattaacaagtgatctagctctcgttttgagcggtgataaaaaataaactgaaaaaaaaggttgttaatttatagaagttatgtttttttagatacagataacagacaaacacatcattacattaattgataggtaacccatgatcatcactactctactacaaactctacgactaacagcgcacatcgcggctgtggttgttgtgcgtgtggtggtggtcgtcggcaaagcgccgtaacgggtccgaatcaacacagtttcgcaaccccgccggcgtattaaccgggcggggtttttcatatctaccgcccataaagtccggcttagtaaaaaggacacagaacaatgggtgctcaacaagataatgccacaggaaaaaccttcactggtgcgcaattaattgtttatttactggaacggcaaggtatcactacggttgcggggatccccggcggagccgctcttcctttgtatgatgcattaagccaaagtcagtctattcgccatattttgacacgtcatgaacaaggggcgggttttattgcccaaggtatggctagagcaaatggtcagcctgcggtgtgtattgcctcaagtggaccgggggcgacaaacttagttacagccattgctgatgcaaaattagactcaattcctttggtttgcattacggggcaagtctcttcagccatgattgggactgatgcgtttcaagaagttgatacctatgggatgtctattcctattaccaaacacaactatttagtccgcgatatcgcacagttgccggaaattatctgtgatgcgtttcgtttggcaatgtcaggtcgccctggacctgtatgggttgatgtacctaaagatattcaacaagcgactatcaccttagataaattgccaccgataccacaaaaagatgcagctccagcctttaataccgatttggtgatccaagccgcgcaaatgattaaccaagcgaaaaatcctgtgctttatttagggggcggtattattagctctgaagcgtgtaaagaagcgattgaattggcggagaaaaatagcctacccaccacgatgacgttaatgggattaggtttaatgccaccaacacacccgctatatttagggatgttaggtatgcatgcggcacggagtaccaactttattttagaagaagccgatctgctgatcgtattgggggcgcgatttgatgatagggcaattggtaaagcagaaaagttttgccccaatgcgaagatcattcatgttgatattgatagggcagagataagtaagatcaaacgtcctgatattgccattcatgcagatgctaaagcggtgctgtcgctgttattacctttaattaatattaatcagcgcaacgaatggatagatagagttaataccttaaaacaggaatatcccttagaaatgaaaaactcacacaatattcttagcggttacggcatcgtacttgctgcggcaaattgtgttgatgatgaagcgattattaccaccgatgtagggcagcatcagatgtgggttgctcaagcttatccactgaatcgaccgcgccaatggttaacatcaggaggcttggggacgatgggatttgggttgccggcagcgataggggccgcattggcagagccaaataaaaagatcctctgtttttcaggggatggtagcatcatgatgaatattcaggagttagcaacagccgctgagcatcagttagatgtaaagattattttgataaataatcaagcattagggttagtacaccaacaacaaacactcttttttgatgagcgtatttatgccgcagcctacccttatcaaacggattttattcgtattgctcaaggatttgggttggatacttgtgatttaaatcaagaagcagatcctcaggcggcgctacaagcggcaattgctaaacctgggccttgtttaattcatgccatgattgatattaacgaaaaagtatttccaatggttccgccgggggcggcaaatatcgagatgataggagcttaatttatgtcactacaatcacaacctatcgcactagaacttattgttcgtaaccatcccggtgtgatgacccatatttgtgggctatttgcgcgtcgtgcatttaacgtcgatggtattttatgtttaccaatgaaaaacagcgataaaagtcgtatttggttattagtacaaaaagatgagcgtttaatgcagatggtgagtcaagtggaaaaacttgaggacgtaaaagaagtgcgttttagtgatgatctgcgcgtttttgaacagatggaaagttatttaaattaattgcactgtttgttctggctctttttaggtacgagagagccagaacctaaatatctaatgatgattatcttccagatgttgtttatcctcgctttccatctgtaaggtaatatgattgatatgaaattgttcacgtagttgcttatcaatagcaaggcgtaatgtttcactatctacattgggttgatagacaatatgaccactgaggatcaacttgctttgcgtcagtgcccataaatgcaaatcatgggagctagccacccctgcggtattattaatggtgtctgttacctcagttaaattaatgcctttaggcacgccttctaataaaatattcaggcactcttttaataagatccatgtgcgcggaaagaccataaagccgattaataccgcaataatagaatcaactaattgccaaccggttagccaaataattaccgccccaataatgacgcccactgagcctaacatatccgcccacacttcaagataagcccctttaacgtttaagctttcatcttttgcactggtgagcattttcattgagataaaattaatgataagccctgcgattgccacaacaagcatacccatagactgaatgtcaggaggggaagagagtcgttgataagcctcataaagaatataaaaagccaccgccattaagatcagtgcattcatcgcagcagccaatatttcaaaacgagcatagccataagttctgaatagatctgctgcttttctacctgcgtggatcgcgataagagcaagtaagagtgcaaatgcatctgtcatcatatgcattgcatcagaaatcaaggctaaactttctgttaagtagccaccaataaactcaatcaccataaaagagcctgttaatgcaaaagcaattaacagacgtgattcaggtagcgctttgacatcaccgtgctcgtggcctgcacccatgctatttatccccgccattattaataatacttagaataatagtttaaatggcggtgaaatataatgggtatttgtcttaagggcgatgatgatagtgttgttgattggggctagacatgataactgatgcacgcatatggccttctacacaaatataagagtgtggcgcattaccatgaaaggcataaaaatcgccggtttctaataatacggtttcatcgttagcaaaacgcatcatcagtttgccagaatagaccataatatgctcttgggtgccgtcggcatgggctgggctattaataattgccccgtgcttcatctcaatatgccaaatttcagtaatattgccgatgccaatacggaatttaaattcttgtgcatagtcgccaacgataggcttatgtcgctctaagcgaggatattcttcgcgggtaaaactaaataaatcacctaatggaaatccaagggctatcgcgatagcttctaaggtatcgatgcgaggattagaatcgccagactctaatttggacaatgccgctttagatatgcctgattttcttgataactcattaagtgacaagtttcgagattgtcttaactgcttaaccttattaccaaggtattcgtttgtctttttcggtgattgtgggttcattgccaattcaaaatattgtcagtttaaaagtataatttcctgtagatgataacatcaattcttcacagacgggaaaagcacagactatttagacaatattttgtgaacagggtgcgcgtatcaggcgatattttaaagcatgtttatctatttcttatcccctataataaggcaatattttccattcattcaatattcactatgatgaggtttctacagcgtgtagaaacaaaataatatgttgcaacaaaattatcgtcagtccgagctttttgctattactactattacagtcagtattgcggtgatagggattgttattggattaactattccgatggtggctttacggctaaacttggcggggatcagtgaatctattattggtctgatttcagccgcacctgcgatgggaatgttaatcatctcaccctttgcacgctatattgtgcaatggcttggtaaacgtttagcgatgttattagcaacgattatatcagccattagtctattgcctttaatggggagtttgccattagaattcctgttcccattacgactaatcaccgggattgccagtggtgtgatgatctgtttgggggagacatggatcaatgaacttgtagcggataataagcgaggtcgtattttagcgatttatacgaccgtgtttactatcagccagttgttaggcccttcaattattgcgttatatggcgttgctgataaaacaccgatcttaatcagcgtactgcttcatattatctctatcgtgctatttttaatgatggatcagaaagtgggcgataaattagctaaagactcagaagagtcgcacttttctattcttcgttttattaaagtggcgcctgcgatatgtggtggcattatcttttttgcattttttgatggcacagtgttgtctatgttccctatttatgggctaagtgttggtcatagtgaagcgattgccgcgatgatgatcagtgctattttggcgggagatgccataatgcaaatgccatttggttggcttgctgatcatatgaatagaacacggctataccgaatttgtggtgtcattacattattagcaagcttattattgcccattgctatgccacatactttagttatttggccactattattagtgcttggtgcaacggcgggagccatttataccattgcattggtacaaattgggcaatacttttcaggaaatgatctgatgatagcaaatgcttcagcggcgatgttatggggcattggtaatctttctggtcccattttagccggtgctatgtctgaaatctctccatctgcgttaccttttttattggtggttatgacgggattatttttagtttcgacgatggatcgctttaacttgcatgtcgacactctaaatcgtcatacatcataattgcatgctcttttttaccttattgtaggtaaaagagggcgctattttcattaaattagacaataatttcctgctgttttatcacccattcaattattttttcttttattatctttattttaataatcaatgcgatacatactattcaaaggtttttattggtgatttattaagaataatccagaaataataaaatgaaataagaaagatttgccaaatggcactattttcatctagttttatcacaaggaggtgtatgtttttcaagcagagtgtgatgaatactgagtcaatattatcgccaaacaagggaagatgctgttaaaacagtaagttcaaaaatgataaaaacataagaaatatttaattaatatttatagtatcaaaccaagcattattaatataaacatcaatgatattaataaaaacagttgattataagtacgcttcaccttttagggtgatagcgttgctaaaacagtttaaccagaggagaaatatatcactattctcctcttttcttttttctgcgaacactagaatgtctttttatgacatttttgctaaaaaagtattttttttcttgattcttaccctaaaagcaccagataatcgtttgcgtcaaattctctcactctatccacattaataaacaaacgtttgctttttcactcctctgatgatttttttaccattggaggtgataataattttagacgtaatcgttttcgttggggagggtgaactgttttttatgtcagaggaatgtaatgtctgctaatcaatcagcaaccacaggtaaactggataattattttaagcttaccgcccgaggcactacggttcgtaaagagatgatcgccggtttaacaacctttttggcgatggtctattccgttattgtcgtacccagtatgctagggcaagcggggttcccccacacggcggtatttatcgcaacctgtttagtggcaggatttggttctctgttaatgggattgtgggcaaatctacctatggcgattggttgtgccatttcattaacggcatttaccgcctttagtttggtacttggtcaacatatctctgtacctgttgctttgggggcggtgtttttgatggggtgcctatttaccctattttctttaacagggatcagaacgtggatcttaaaaaatattccgattggtatcgctcatggcgccggtattggtatcgggctatttttacttttgatcgcagccaatagtgttgggttagtggtgaaaaatccattagccggattacctgttgcgatgggagaatttacttctttttcagtattaatgtcattggccggtcttgctgctatttttggtctagaaaaacgtaaagtccccggtggtgtgttattagtcattattgcgatttcgattattggattgatttttgatcctaacgtgaaataccaagggttctttaaaatgccacaattaggcgaagagggccttgcactattatttgccatggatattaaaggcgcattacaaccacttgttttacctagtgtattagctttagtgatgacggctatttttgatgcgacaggaaccattcgcgcagtggcgggacaagctaatttacttgataaacgaggacaaattatcaatggtggtaaagcgttaacttctgattccgtgagcagtatatttgctggggcaattggtgcagcacctgcagcagtatatgttgagtccgcagcgggtactgcagcaggtggtaaaacagggctcaccgcaactgtggtcggtattctctttttattgatcctctttttatcaccgctatcttatttagttcccccctatgcgacagcccctgcattaatgtatgtgggtttattgatgttaggtaatgtcactaagttagattttagtgattttgtcgatgcgatgtcaggtatggtgtgcgcggtatttatcgtattaacgtgtaatattgttacaggcattatgttgggttttggctgtttagtgattggccgtatttttgccggtgagtggcgtaaacttaatattggtacagttctaattgctattgctttagtggcattttatgccggacactgggcaatttaattaaaatcatcaggtttaaacataaaaagcggaatatatttttattccgcttttttgctatttatttatctagttttattcgctattgtcgaggttaagactcattgttaattttttggtaaaataaatgcatcagatagaaatacgacatggtgagcctgaagatgctatagcaatacagcaattgtatacacatccagacttatatatttgtacttgtcagttcccttatccatcagtcactatgtggaaaaaaaggctaattgaattttctgaacaaaatattccacattttgttgcttcttttgacggtcaaatcgcaggtcatttagcgttgatcatcgacaatcatcctcgtcgtcggcatatcgtcagctttggtattggtgttggtgctgagttttcaggaaaaggtataggtaaagcactcattaatacggcaattgattatgcttttaattggttggctgcaacacgtatcgagctagaagtttatgctgataatgaaagaggccttcatttgtataaaaaattaggttttgaagtggaaggcattcgtcgtaatgcagccttcagagaaggtaaatattgtgatgttgtgatgatggctcagctaaaaaatatcgaataactctgtgggggcttgacgctgttttcatttttcaatgatagagcctattttactttttgatcctcttaagagtatgactagaacagaaaacagcaataacagcatactttttctctttctgatgccgttaatagataacactatgcattaatatgttagcttttttgtaagatacgattaatcttaattttatatcattcttcattagtcgatgtgggttcagtttaaaataggaaaggtaaagataggcatggtagataaacttttatgatgcgtttctttatcattcagcaagggttcttttcatatcaggaaagatggcagattcttagataaaaataagcatgtaagggtagcatggaaattttctttactattttaattttaatattggtagtttctgtttcaggtgtcattaccaaagttattccttttcgcattccattaccattaatccagattgtgatcggggcacttttggcttggcctcagtttggtttacatgtcacctttgatcctgaactcttcttagttttactgatccctcctttactttttgttgatggatggaaaacccccacacgtgaatttatccaaaatggtcgagagatctttatccttgtgctggttttggtgatggtgacagtagtaggtattggttaccttatttactggataatgcctagtattccacttatttctgctttcgcgctcgccgcggttctctcgccaactgatgcggtggcattatcctcgattgtcggtaaggggcgaataccgaagcggatcatgggggttttagaaggcgaagccttaatgaatgatgcttcgggtctggtggcgctgaaatttgccgttgctgtggctatgggcacgatgatatttaccgtgggtggcgcaacctttgagttttttaaagtggcaataggcggtttattagcgggtattgcggtaacgttagtctatagtaaatctctgcgattgatgagccgttggagtggtgatgatcctgccactcaaattgtctttatgttgctgttgccttttgcttcttatttgattgctgaacatattggcttttccgggatccttgctgccgtggccgcaggtatgactatcagtaaatcaggtgtgatccgcaatgcaccattggcgatgcgcttgcgtgcagatagtgtctggtcaatgttagagtttgtctttaacggactggtctttattatgctgggtttacagcttcctgttatttggacaagctcggttattcaagctgatctcgatcctgaagttgaagtatggatgctgtttgccgccgtctttgttatctattttgcgttactgattttacgttttacatggttatggctaatgaagaaaatcagccatctctttatgaaaaaacatccccttgatttcgccacttatacgacgagagaattatggctatcttcttttgccggggtacgtggtgctatcaccttagccggtgcgctctctataccgctatttttaactgatggcagtactttccctgggcgctatcagataatctttattgcggcaggggtgatcctgttatccattttggtcggtattatttcattacctttcttactaaaagggattaaagctaccgataaagaagcggataaaaatgaagtacgttatgccaagaaagtcatggcagaagtcgctattgttagcctcaataaaatggaagagcgtttagctgcaagtacagaagagcaactagatgcggaagaaattaatgaagtagcttctcgagttgccggctatttaagacgacgtaccgcggatcaggacgagatgatgcacaatatgttggtggaagatctggaaagacgttttcgcctaacggcattgcgtgcagagcgtggtgagctttatcacttacgtgcaacgcgtaaaattagtaacgaaacactacaacttttgcttcatgaattagatttaatggaagcgctgttagttgagaaagacagttaattatgtggctactggttattacaacgttgttatgggcggcttcttttagtctgattggtgaatatctcgcaggtcaggttgatagttggatctcagtattgattagagtggtgttagctgccatcgtctttttgcctttcctacgttggaaaggcattcgccttaaagtgattttattgtatatgggagtaggcgcatgccaattgggtattatgtacctgtttgtgttccacgcttataactatttaaccgtagctgagtttttactctttactgtattaacaccactttatgtcaccttaatttatgatctacttgaaagacaacgtttacgttggggctatgcctttagcgcactactggcggtattaggggcggccattattcgttatgatcatcttagtgatgacttctggctgggattattattggttcagttagccaatattttcttcgccataggacaggtaggctataaacgattaatggaaatgcatccacttcctcaacatcacgcattctcttggttttatatcggggcggtggtggttgtgttagtcggctcgttatgttttgccgattggcaaaaaataccgaccacatcgttacagtggggggtattgctttggttaggtattggcgcttctggaataggctattttatgtggaactatggggcgacacaggtagatgctggaacccttgcgattatgaataatatgatggttccagcgggattattagtgaacttctctatttggcaacagcaccctaattggccaagtttcatcataggcgcgagcctgattgttgcatcactttggttccatcggcgttggatacaccaacctgttttacaaaaggcagatgattaacggcatgttgacctgctaagcgtataaactctcgtattgccggttgatgttgctcacctgtacggttagctgcatatagccggctccataatccttctcctaaggtctttgtgaccactaatccttgtttttcaaaattctctacggcccagtgcggcagtgccgctatacccattcctgctgccaccatttgaataagaagtaaggtgttatctacatgtttaaaatgtggcgtgatccctgcgggctgtaaaaaatgacgccaaatatcaaaacgctctctttggacaggatagataaacagtgtttctgagatcaaatcttgtggttgaatatgtaagcgattagccagcgggtgatcaggagacaacacaagcttaacttcataatcaaacaacgcggtatagtgcaggcgttggttatccaagatatcagaagtgagtacaacatctaattctcgttgtaataaagccggttgaggatcaaaagtgacacctgaatggaagtcgacattcacatccggccatgtttgacggtattgctgtaatgcgggtgttaaccattgaatacagctatggcattcaatagcaatatttaaatgagcattacccggctcattacactcttctatcgctcggcgcacaatgggtaggacttcttgcgctaatcttaataacacttcgccttgtggtgtaaatcgtagtggttggcttttacggacaaaaatacgataaccaagacgatgctctaattcactaaactggtgagagagcgcggattgtgtttgatgtaactgatttgccgcattggcaagagagcctgtttgcttaagtgccaatatcgtttttaagtgttttatttctatcatgagaaaccttcaggttgtgaatgaaaaatttgcgcttgtggtttatacactacctgtagattatggatgtgtaaacatctagacggctaaaaacaggattttttattatgacaattcgcaatcacacattaggtttcccacgtattggcttaaatagagagctaaaaaaggcacaagagagctattgggctggtaatatttctcaggcagaacttctggcagttggtaaagaattacgcgctcgtcattggcaacagcaagctaatgcaggagtcgaattattacccgttggcgattttgcttggtacgaccaagtcttgggtactagtctcctattaggcaatataccgccacgccatcgtaatgaagatggtcgcctagatcttgatactctatttcgagtggcgagaggcagagcaccaacgggtaaacctgcggccgcctcagaaatgacaaaatggtttaatactaactatcactatatcgtgccagaatttcagcaaggacaatcatttacactggcgtggcaacagctactggatgaagtcgatgaggctttagcattaggccataatgtgaaaccggtacttttggggccgatcacctacttatggttaggaaaagttaaaggacctgagtttgatagattgtcactgttagacgctattttacctgtttatcagcaagtattgagtcagttacagcaaaaaggtatcgagtgggtacaaattgatgagcctgcactggttcttgatttacccattgagtggcaaaatgcttatcaagttgcttatcaagcattgactggacaggttaaactattattgactacctattttgatggtattactcatcatcttgatattattaaaaacttaccggtaaatgggctacatattgatctatgtgcaggacaggacgcattgcaagttatacaccaagcattgcctaaagactgggtgttatcgttaggggtcattaatggtcgcaacgtctggaaagcggatctaactacccgttatcaacaagtagttgcattaaaaggtaagcgtccattatggattggcacatcatgctctttgttgcatagtccaattgatttaagtgcggagactaagcttgatgatgaagtgaaaagctggtttgcctttgcggtgcaaaaatgtgcagaagtggcgttactcgcaaaagcattaaatgcaccagaaggtgaatatgacgaacaacttgcccaatacagtgcccccattcgtcaacgtgaacactctagtcgtgtacataatgcaaaagtggccgcacgcttgcaggcgattaatgcacaagacggtgaaagaacatcgccttatcaacaacgagctaaagtgcaacgcgctcggtttaatttccctctgtggccaacgacaaccataggttcattcccacaaactaccgagatccgcacagtacgtttagactttaaaaaagggcgtattgataccactgcttatcgcactaatattagcgagcatattaagcaagccatagatgaacaagagcgcttagggcttgatgtgttggttcatggtgaagctgagcgtaatgacatggttgaatattttggcgagcattttgaaggttatgtctttactcaaaatggctgggtacaaagctacggctcccgctgcgtaaaaccgccggtgatcattggtgatattagccgtcctgcaccgattacggtagattgggcgacttatgctcaatcattaaccgataagccagttaagggtatgttaactgggccagtgactattttatgttggtctttcccgcgtgaggatgtcagccgtgaaactatcgctaaacaaattgcgttagcgttacgtgatgaggtggatgatttacaaaaagccggtatcggtattattcagatagatgagcctgcattacgcgaaggattaccgttacgtcgtgatgagtggcaagcatacctagattgggctgttgatgcctttaagctcagtgcagctatcgctgatgatgagacacaaattcatacacatatgtgttattgcgagtttaatgacattatggaggcgattgctgcattggatgcggatgtgatcaccattgaaacatcacgctcagatatggagttattagaagcctttgaacattttgattatccaaatgaaattggtcctggggtatacgatattcattcgcctaatgtaccgaatgtagaatggattgttggattgttaagaaaagcgcaatcgcgtatccctgcggaacgtttatgggtaaatccagattgcggtttaaaaacgcgggggtggagtgaaacccgtgcagcattggcaaatatggttgaagcggctaaatatttacgccagaacgtataataatatttaaataatatattttagtagcctgttattttgatgttatcaatataataggctatttttttcttattaatcaaaaatgtttattaataggtaaataaaaataagagataatcttattattgatattttttaatattgctatactgcacaaaacttaattttatggatatagatattgtgcaaaatggtattcacctgtcagaaaaaatattaaatgcatttcctactcgagccttaacattatctccattaaaaggggatggcggtttattccgtaccttatttttagtgattgcaatgttagggatgacagtatttagtgcttatcaaattcctaatattgtttatgattatcaaattagtaaaaaccccgtatttattgatgccgatgttgatggctcttgccgttcaaaactatttgttttaaccaattgtagtgttgacttacgttataaaggtaacgaggtttcacgaaattttacttttcttgattttggcaataaagatatattggttgagccagtagcagatgaaaacgatctgactaaaatgaccgtcgatgtggcaattgataatatttggttacgcttaattagtgcattagtttttactgcattatttgctttttgcgtgatctttttcatttatcgtcaaatgatcagcaataaagtcaaaaaagcattgctttcagtaggcaccaaacctttaaaattaacggctatccccgctaaggtcgttgtgagtaataaacaatttattgctacttataaaaccaatgttgccggaaaagagacttcaattacttattcaggtaataagaaaacgccacctattacattagaaatggaaggcaaaacttatgttttggcggtgtacgagccacaacaaaatattccttatgtcttagatgttcctttagctcgaattcaagcaacagaagaagaaaaacaacgttttcatgaggcattaattgaggaaggtattctctaattacgctttaatgcagtgatgagagcgattgattatagaaagcaagatggctattgcgcttgattggttaagaaacaatagcgccatagccatcattcaatttattagccaccaaagatttttgctttaagtatatccataccggcgctcattaaatctaactctttggggataacaccttctggcgtgagtttatcaaccaattttggcaaatattgtgctgccatatcagaggcttcagcggtattcatattgatctttgccgccaattcattaatcactggcgatgaaaaaacttgtacgatttgctcggcattaataggtaaattactgcctgtgctaatccaagattggatcagttcacttaatcctgcgctattaaactgtttaaccaagccttcaattcccccttgggtttctacccattcgagtactgttttgaattgattaattttctcaccgcccaacaggcttgcgatttggttaaataagctcatgcttgctccaataactatcaacgcattattacgttatattgagatgttaattttaaaggcgagtagtgtacgtgaagttagtatcttcatctatactcaagtgatatttatccgactaagcaagaatagaatgcaggattttattacgccaaagcgatattgataatgccgccatagcgtcgctattcgacactgttatttgtgataactatcacgtttttatgaaattgttactttttttattacctgacaggtgacgtcaatcactaaaaaggtctaaaaaactgataaagtaacacttaatttaatgaacattggttttgtcccattgaggagtccgatatgtctgatgtatttcacttaggtttaaccaaaaatgacctacagggtgccactttagcaattgttccaggtgatcctaagcgtgttgaaaaaattgccaaattaatggataacccagttcatctggcctctttacgtgagtacacctcatggcgtggtgaaattgatggaaaagcagtgatcgtttgttctacagggatcggtggtccatcaacctcaattgcagtggaagaattagcacaattaggtattcgtactttcttacgtattggtacaacgggcgctattcaagagcacatcaatgttggtgacatcttagtaaccacagcagcggttcgtttagatggcgcaagtttgcactttgcaccaatggaattccctgcagtgtctgactttgaatgtatgaatgcactgtataaagcggctaaagacaatggttcaacggttcacgttggtgttacagcctcttctgataccttctacccaggccaagagcgttacgacacctatactggtcgagtcgttcgtcgttttaaaggctctatgaaagagtggcaagaaatgggtgtgatgaactatgaaatggaatccgctacattattaaccatgtgtgcaagccaaggcttacgtgcaggtatggttgcaggcgttattgttaaccgtacccaacaagagatccccgatgctgaattactgaagaaaactgaaaataatgcattaggtatcgtgattgaagctgctcgcactttaatgaaataagttttctaaatgaaatactaaagcctttaatacattggtgtattaaaggctttttttgtgcggtaattcatcatgttaatatgtcaaccgtcatagatttctgttaaggtcttgatggtcttaacaatacaacaatgagaagaggcattatgactgatatcttacaaacacatccttcggtgttgcctttaacaggtgggattaactttcgtgatctagggggaaaaaagctcagtaatggcggtattatcaaacccggcttactctttcgctccggttcactggatagattaacggataccgatcaagcgcttcttattgataaaaatctttttcaaatcttagactatcgtgacacaggtgaaattgttgataagccggatcgagtatgggaaggggcacaatattaccatgctccagctaatccattatcgaaagaagtgtcagctaaccttgaaaaactcaccccagaaatactggaacagtttgatgctaaagcatttatgtttcagctatataaattactacctattaataatccggcttataaacagttggcaacgttgttgaagcaaccagaaaaaggcggtgtcatacaacattgtgcagtaggtaaagatagaacgggggtgggctctgctttagttctatttgccttaggggcctcattagatgtggtgatggaagattacttactcaccaatgaaacattagcgcctttccgcgcttatcttttagaagagcatgctaaaacactgagtgaaaatgtggtgaataaatttgcgtatgtttattcagtacaagaagagttcctgcaaacagcccttgccagtattaatcaacactatggcaatatcgatacttggcttgaaaaagatattggcttggatgcgcaaagtagagaaagcttacaaaactattttctcgaatagtgaagtgatttatattcggttaaagatgttgtgcttttttactgaaattaaccgaatttaaggtctctattgtgacagtacaagacattatccataccatcactctgtttgtaaaagagcacgaaatatgggctgtgcctatcgtgttcttactggcatttggtgagtcacttgcctttatctcgttattaatacctgccactgttatcctattaggcctaggagcattaataggtgaaagtggtctactcttttggccaatttggcttgctgccgccctaggcgctttttttggtgattggatctcctattgggtgggttatcactataaagaaggggtaagaaacttatggccgatttctcgctcaccgcagaccttggtaagagggcatcaattttttaatcgctggggtgtttggggggtatttattgggcgattttttgggccttttcgggcaatagtgcctttagttgcgggtatttgtgctatgccacaacgctattttcagttggcgaatttggcttctgcgatgatctgggcatttggtattctggctccaggggcgtttggcctgcaatggctggcgaaatggataggataattgcgtcctttatcgcaaatcagcgtatgatgtaaattgttgctagacaatgttactgatgcgttttaacgtagcccgctagaaaataaaaaggttacttgagtggatattcagttgttatacgggatcattggtttattaggcggtgtattggtgggggggatcgccgtttggtggcttatccaacaacgcttagccgaaaaagaaaacctattacgtgaaaattatactcagcttgcggttgcacaacaaaaagcattggtgatcccttctttacaacaacagatagcgcatttagagcaagagttacgtgcacaacgtgaaataattacttctcaagaggccgaattaagggaagtgaccacgcgttgggaagagagccgaatatccgctgaagagaaacagcgtttactgcttaatagtgaacaacgactagccactcagtttgaaaatctggctaaccgcatttttgagcaaagtggacgtaaagcgcaagagcttaatcgtcaaggtttaacccatctcctttctccatttcgagagcaactagagagttttcgtcggcaggtacaagaaggttttggacaagaagcgcgagaaaggcatacactggtacatgaaattcgccaactgcaacaactcaatgtcaaaatggcgcaagaagccgttaatctgactaatgccttaaaaggggataataaaatccaaggcaactggggagaaacggtattagcgcggatcttagagtcatctggtttacgcgaagggcacgagtttgaaactcaagtcagtattcgccatgaaaatggcagtcgttatcaacccgatgtgattgtgcatttaccgcatcgtcgagatgtgattattgatgccaaaatgtcgctgattgcttatgaaagatactttaatagcagtgatgagaatgaacaaaaacaagcgctgcatgctcatgtgaactctatcagagcgcacattaaaggcttaagtctcaaagattatcataagctaccgggagtgacttcgttagactacgttttaatgtttataccgatagagcctgcttacctcgttgctattggtcattctccagatttattagaagaagcattgaaaaataatataatgttggttgggccatctactttacttgttgctttgcgtacaatagccgcattgtggcgttatgaataccaaagccaaaatgcgcaagaaattgctgatagagcggctaaaatgtatgacaaattaagacttttcgttgatgatatgcaagggctaggtaatagcattcaaaaagcgcaatcgggctatctattagcgatgaaaaaactctctgaaggtcgtggaaaccttatcagccaagcagaaggctttaaatccttaggggttgagataaaaaagaccattgataatgatctggttgaaaaatcagcttctgattgatttacataaataaaaatagcggtttccgggcaagaaatgtactgaatttactaaattttgattaattagcgggcaaataatatgactcaacaatctaaggaaacaacagattttggtttccaaaccgttgacaaagatgaaaaacaaaccatggtggccaaggtttttcactctgttgcatctaaatacgatttaatgaatgacttaatgtcttttggcatccatcgtgtctggaaacgctataccattgaggcaagtggtgtaagacgtaatcaacgtgtacttgacttggcaggtggaaccggcgatttaacggcaaaattctctcgtttagtaggagagaatggtgaagtggttttagctgatatcaatgactccatgttaaaaatgggacgtgagaaactgcgtgatcacggtattgttggtaatgtcagttatgtacaagcgaatgcagaagagctgccattccctgatgattactttgactgtatcactatctcgttcggtttacgtaatgtgactgataaagccaaagcgttacgttctatgttccgtgtgctaaaacccggtggacgtctattagtccttgaattctctaaacccgttcttgatccgctaagtaagatttatgatgcttactctttccatatattaccaagaattggtcaagtgattgtgaatgatgcagatagctatcgctatttaacagaatctattcgcatgcacccagaccaagaaacattaaaaggaatgatggaagaagctgggtttgatcaggtttcctataccaatatgactggaggtatagttgcattacacaaagggtttaaattctaagatggaaaaagccactttttctcatgatattgcttctcaagtgctctatccactgataactgcatcgatggaaacggcacttaatcatgttttatatcaggaaaatgtgcttaaacctgcccgcaatcgccttgcgggcaaagtcttggcgctttctattaatgagtttcctcaatctatctatttaattttcagcgaacagcaagttgatgtgttaactcaatggaatgatgagactgattgcacgataaaaactaaattattaaccttaattaaactcactgaccgacaaaagttgtctgaattaattaatcgtggtgatattaccattgaaggcgatatgcaggtggtacaaaactggtctgccttgctggatatggcaccctgggagcctgcgcaatatttagcgccttatattggtgatttggctgcagaaggattatcgcttgcagcaagtaaagggctcaaattattcactacactatttggccgacaaaaagcttatttaagagacgctttgattgaagagtggaaaaccgccccctcaacattagagactgtccatttttatgatgaaatagaacaactggcacagcaaacagccgagttagaaaaacggttaagcaccttggagaaaaaataatgctcctcagtgagttaaagcgcctttatcatattattaaagtcttcttatcttatgggcttgatgagctaattcctaaacatcgaattaccttgccagcaagattggggtgccgagcactattttggatcaaaaatcagcatgccgataaaccattaggtgagcgcttacgacttgcattacaaacattagggcctgtttggataaaactgggtcaaatgttatcgactcgacgtgatctttttcctcctcatatcgctgatcagttggcgttactgcaagataaagtagccccttttgatggtaaaaaagcgcgacaatatattgaaaaatcatttggtggccctatcgataaatggtttgatgattttgacgaaacacctcttgcttctgcgtctattgcacaagtccataccgctacattgaaagaaaatggtaaagaagtggtattaaaggtgatccgtcctgatattcagcctgttattaaagcggatattcgtttgatgtatcggttagcgaatttattgccatttttacccgatgggcgtcggttacggcctaaagaagtgatccgcgaatatgaaaaaacattacttgatgagctaaacctattacgtgaagcggcaaatgccattcaattgcgtcgtaactttgaaaatagctctatgctttatattccggaagtgtattcggattattgccatgaaaatgtaatggtgatggagcgtatttatggtattcctgtttcagatattgatgcgttaaatgcccaaaataccaatatgaagctattggcagagcgtggggttaaagtcttttttactcaagtatttagagacagttttttccatgcagatatgcatccgggtaatgtatttatcagttatgatcatccggaaaatccatactatattggtattgactgtggtattgtcggctcactgaataaagaagataaacgttatttagcggaaaacttcttagcattctttaatcgtgactatcgtcgtgtggctgagttacacgttgattctggttgggtacctgctgataccaatgtagaagattttgagtttgctattcgcacagtgtgtgagccaatctttgaaaaacccttgtcagaaatttcttttgggcatgtgctactgaatctttttaatacggctcgtcgttttaatatggaagtacaaccgcaattggttttactgcaaaaaactttgttgtatgttgaaggcttaggtcgtcagctttatccacagcttgatctttggaaaacggcaaaacctttcttagaagattggctacatagtcaaattggtattactgcgttggtaaatggtatcaaaagtaaggcgccttactggattgaaaagatgcctgaattgcctgaattggtttatgatagcctgaaacaacacaaaaatatgaagttaacgctagaaaaattgacggaacaaataagttcacagagagtcaaacaaagacagtcctattttttattgggtatgggaacaacgctatttttatgcggtagcctgttttttgtttctggttttaaaacattatttagtgtttttatcagtttaggccttctcgcatggatttggggctggtttaaatcaggtaatgcacaataaaaacacatcaaagtttgtctttgaacaatttataatatgaattcgagattcccgaaaattgaattcgatgtatataatgggcactgttgtaaagtataactcctaaaatagttgaggaacataaaatgggcggtattagcatttggcaattactcatcatcgctgtcatcgtagtcttattatttggtactaataaactgcgcactttaggctcagatttgggtgcttcagtcaaaggctttaaaaaagcgatgggtgacgaaaaccaaaaagagaccaacaacgcagaaaaaaccacgaacgacgcagattttgatactaaaaatttagcgcagaagacttcgacagaagagaagtcaaccactgagagcaaaaataaagagcaggtgtaaaccgtgtttgacattggttttagtcagctgctattggtcatggtgataggtcttgtttttctggggccagaacgattgcccgtagcagtaaaaacaattgctggctgggtaagggcattacgctctttggcggcgaatgtgcaaaatgagctaactcaagaactaaaacttcaagagcttcaagagagcctgaagaaagtggaagagaaagcgaatttgcaaacattatcccctgagctaaaagcgtcgatggatgagttaaaagaggctgcacagtctttaaaagaaacttatcaagcacctacaacgccaggatctacagagacagagcagtctgtaaaaaccgactctacggaacctacgccttctgatttagcggcactggctgaagcgaatgaagtgaatgacgatgttcaacacagttccaaaacggtaactgaaaatacagaacatgttattaagccagatgttcctgttaccaaaacagtaacagtagagaagaaaacaactgatcaggcaaatggtgagcactaaaacatggcagtaaatgatacccaaccgctgatcagccatttaatagaactgcgtaagcgtctaatgtacagcttagtttcagttctagtggtttttctggctttggtttatttttctaacgatatctatcaattaatctcggcacctttacttgataagttgccacaggggtcaaatatgagtgcgactgatgttgcctcaacttttttgacaccgattaaattgactattatggtatccgtttttgcttctgttcctgtgatcctttatcaggtatgggcttttatcgcaccagcactgtataaacatgaacgccgcttaatgttaccgttactggtttcaagtaccgtattattttatctcggtatggcgtttgcgtattttgttgtgtttccacttgcatttggtttctttgtgaatactacccctgaaggggttaactttattccagatatcagtaagtatttaagtttcgtaatgacgctgtttatggcgtttggggccgcatttgaagttcctattgcgatcatcttgctgtgttggagtggtgtcacaacacctgatgcattaaagaaaaaacgtccttatatcttagtgggtgcttttgttattggcatggtattaacgccacctgatgttttttctcaaacattattagcaataccgatgtatttattgtttgagattggtgtcttggtgtcccgtttttatgtcaataatggcagaagaaaaacaccagaagaagaagctgaagaggctgaggcgcaagcaacagaacagcagaaataattttaggaagtgagttttctaaaaacataatttattaacccagctaaggctgggttaactttttagaaaggctcttttttaaactctttattatcaacggattttttcacttcattatttaatatttttaatagcaaaatagagcgagtttcgccgtctggctcttggtatatcgctttgatcccctgaaaaacaccttccgtaattaatacataatcaccactatgcggcacattttcttcactgtagataactgaagacggtgtcggcgattgtaaggtatctataacctcttgtggcactgtgacaggatagcgtccaaagcgcacaaaggcattaacaccacgggtagaatttatcgtagtggtatgaatgacctctggatcaaattgaataaatagataattcgggaacaaaggctcggtgaccaaagttcttttatttcttattaacttttctattgtcaccatcggcgtaaagcagatcacctgctgacgttctaagtgttcgatcgcccgagcgatttgtccgcgtttacaatacagaaggtgccagtttttcataatagagacaaagggttagttgattctaattaggaggataatagcaaatttatgataaaggtaacagtcatctgtcggtaaatgtaacaagtgaaatgcaattttatactagaaaatgatcactgaaaccgtgttcagacgcattgacatcctccacgccctaaaggacgtggatccctactgcgttcagactgatgtctgaatcacctcggcgggttcctgcttcgacgggcggtctgactgccccctccctccacaggcaagcacggcatgtcctgccgctaaaatgttacgtgccccgttgatatcagcattcgctgtatatccacattcaaggcactcgaattgactttgtgactggcggttttcctttgctgtatgtccacagcaagcacacttctgactggtgtaggcagggggtattgccagtacctgaccacctcgccagagctgcttgtactcaagctgacggcgcatttcataccagccctgctccagtattgagcggtttaaaccagatttagcttttacgttccgtccatgccgttctgtcgtaccttttgccgatttagacatgttactgacctttaagtcctcaatgacaatcattgcgtggtttttgctgatttcgctggtgactttgtgaaggtagtctttcctgatattggcaatatgagaatgcagacgttgaattttgcgcttttgtttttgccagttggcactgaatttgattttacggcttaacttccgttgaagccttgccagctttcgctggttgactttaaaactgctgacgggcgggtataccgtaccgtctgaaagcgtggcaagttttgtaacgcctgcatcaagcccgactattgaggttgattcaggttgtggttctgtcgcttcatactcagtctggatgctgacgtaccatttaccgcatgactgactgaccgtgacgtttctcacttctccgacgacttcacgactgttgcggtagcgcatccatcccaactttggcaatgatatacgactattggattgatcgagcttcacgccctgcgggtagcgaaaagcgtcatttttaccgcgtttcttgaatcgaggaaaagcggtacgcttctggaaaaaattcttgtaagcccgttccaaatctttaagtgactgttgtaacggttgtgatggggcttccttcaaccattgtgtctctgtgtcagatttccactcaatgagccatgaagccatttttgtatagggaatgtatttattccctgcttcgtaattctcattctgacgtgctaatgcccgattgaaaacaaaacgacaagcccctgcaaagcgtctcatctcacgctcttgctgaccattgggtcttaactggaatttaaaggcttgtagacgtttcatattacctattatactttggtccatgaaaaatgaaactaatattcgccgtggcagacattgtgtattcctgatgcacgtccatttggtctttgtcacaaaatacaggcgaaaaatatttgatcaggatgccattgaaaaattgcgaggctactttgccagtgtttgtgctgattttgatgttgaactggttgaaatggatggggaacgggatcacgttcatttactgattaattacccgccaaaactggcgatatctaatctggttaacagccttaaaggggtatcgagtcgattacttcgacgtgatcgtcctgatattgcccaatgtgattactacaagggggttctttggtcgccgagttatttcgcggggagttgtggtggcgcaccaatatccattatccgccagtacattgagcaacaggaaacaccgagttagttaaaaaaccgcgccttatatccccgacctgaaggacggggttttacggtgctttggataaatgcagtggttttgagaagtttcaatcttatctcagatagaggtaacaagttgacaaaaaaatgatggcaaaaacaagaaaaaactcccaagataattatcttagatcctgatccataattataaagaggttttcaaatggaagtttttttattgagtaatgggaagattgccggggacccacaatggttaagttacgccaaagataatatcgacagcatgattaaaaagcgtggtattcgttctgccgtgcttattgcatatgcggttattcgttctgatcacgaccaacgtgctcgtgaattatcagaagtattaggtattgaagtgacttgtattgaacattttgattcagaagtggaagccattaacaatgctgagtgtattttagttagtggggggaatacgtggttattaaaccaaatgctgcatgagaaaggattagtggttcctatccagcgtgcagttcgtgaacgtaatatcccttatatcggttggagtgcgggttgtaatgttgccactccgactatccgtactacaaatgatatgcctgtgcgctgttctgttgttatgccttcactgggattattccctgtacaaattaacccgcactatattgatgccaccattagtggacatatgggcgaaactcgagatgagcgtattgcggagttttgtgcgatgaacccagacgagatagtggttgccattcgtgaaggtagttacttatatattcagggtgaagagttacgttattacagcgctaaaaatgaaggctttaaaattttccaacatggaaaaacttttccagaacaatttgatacaaaaatgttggcaaaatgggttccatttcgctgtttataataataatttgcaatctcatataaaaggcattgctttttagtgagttatgcgtttagcttatagtgtttcaaagagggctttgccctcttttctctcactcactggctcgtaagattatgatgaaataccgcgatttaagagatttcctttcattactcgaagaaaaaggtgaattaaaacgcatcacctttgaaatagatccctaccttgaaatgaccgaaatagcggacagaacattacgtgctggtgggcctgcactgttatttgaaaatcctaaagggtttgatatgccagtgctatgtaatttatttggtacacctgagcgtgttgctatggggatggggcaagatgatgttaaagccttacatgaagtgggtaagctattagcatttttaaaagagcctgatcctccgaaaggatttcgtgatctttttgataagttacctaaatttaagcaagttttaaatatgccaactaagcgcctgagcaaagccccttgtcaggaggttgtgttaactggcgatgatgttgatttaactaagatccccgtgatgcattgttggcctgaagatgcagcacctttgattacatggggacttacagtaacgcgagggccatttaaagagcgccagaatttaggtatttatcgccaacaagtgcttggcaaaaataaagtgattatgcgttggttatctcatcgcggtggcgcgttagatttccaagaatggtgtcaaaaacacccaggagaacgttttcccgtttctgttgcattaggagctgatcctgcgacaattttaggtgccgtaacgccagtaccagatacattatctgaatatgcctttgctggattattgcgaggtaataaaacagaagtcgttaaatgcctttccaatgacttggaagtcccggcaagtgctgaaattattctcgaagggtatattgaacccggtgagcttgcaccagaagggccatatggtgatcatactggttattataatgagattgactcttttccagtatttaccataacacatctaacacgtcgtaaagatgctatctatcactctacttatacagggcgtccaccggatgagccggcagtattaggcgttgcgcttaatgaagtattagtaccgatattacaaaaacaatttcctgagattgtcgatttttatttacctcctgaaggttgctcttatcgtttagcggttgtgaccatgaaaaagcagtatgcaggtcacgctaaacgcgtaatgatgggagtttggtcttatttgcgacaatttatgtatactaaatttgtgattgtttgcgatgatgatgtgaatgcaagagattggaaagatgtgatttgggctatcacaactagaatggatcccgcaagagataccattatgatggaaaatacgccaattgattatcttgattttgcttcacctgtttcaggtttaggctccaaaatggggttagatgcgaccaataaatggcccggtgaaacagagagagagtgggggcgacctatcgtaatgacggatgaaataaaacagcgggtcgatactatttgggaacagctcgatattgttaaataataatagaggaacaacatggcgatactgaactgtaaagtctcactcgttgagccgataacagatacggtgtatcgggtaagattattacctgatggcccatttgattttcaggctggacaataccttttagcggttatggatgagcgagataagcgcccattctctattgcctctattcccgaaaataaagactttattgagcttcatattggcgcgtcagatctgaatctttacgcaatggctgtgctcgatcttattttagaaactcaacaattaaagattgatattccccatggtaatgcgtggtttagacaacagagccaacgtcctttgttgcttatcgcaggaggaacaggattttcttatactcactctatcttgctagcggcattacaagaaaatcctcaacgtgcgataacgctttattggggaggacgagagcaggtacatctttatgatcttaatgagttgcaagatttaacggaaaagtatccctcattatcagtcgtacctgttgttgaacaacctgatgacgcttggcgtggtagaaaagggactgtattaacggcaattagtgaagattttggcgatttatcatcctatgatatttatatcgcaggacgttttgaaatggctaaaatagcgcgagatcgtttttgtaatgagcgtaatgctgatagagaacgcttatttagtgatgcttttgagtttatttaataagcaataacgataaaaaaaccataaaaaaaccataaaaaaaccataaaaaaaccataaaaaaacccgcccctgacggcgggaaaatggttaaaaaaccaagcaatcaaacatgtcaaccaagtgatattactcaaaatgaaaaatcatcttgattaaactcgctcaataatggttgctatcccttggcctaatccaatacacattgtcgctaatcctaattgtgcatctttacgctccataatatttaatagcgtggtggttattctggcaccagaacaacctaatggatgcccaagtgcaatagcaccaccattaagattgattttgtcatcaatgctatcgagtaagttcatttttttcatgcaagctaaggattgcgctgcaaaggcttcgttaagttcaaagatatcaatatcactgagggttaaccctgctttctttagcgctatttcagtggcaggaacgggaccatatcccatgattgccggatcacaacctgttaccgccatcgaacgaataattgcacggggttttaaatgatgttgcttagcataactttcgctcgtgataaacatcgcggatgccccatcagagacggccgatgaattccccgcagtgacggagcccgtggcgggatcaaacacgggtctaagttgtgctaattcatcaaggcttgggttataacggataacttcatccgtgctgacgcgtataaaatctcctgctgtatcatgaccattaatggcaacaagttcgttgtcaaaatagcctttttgggtcgcgagggcggctaaatggtgtgagcgataggcgaatttgtcttgttcttcacgagatatttgaaatgattttgctaacatttctgcagttaaccccattgagaatgaagcctttgccacagaaagatttaatgctgggttaaagtcagcattataggtcatcggtacatgacccatatgttcaacgccaccaattaaagcaacttggctctctcctaacataatttggcgagcaccgtcatgcaaggcttgcatcgaagagccacataaacgattgacggttactgccggaactttatgtggtaattctgctaatagtgcggcattacgtgcaatattaaagccttgctctaaagtttgttgcacacagccccaaatcacatcgccaatatcattgggatcaatatcagggttacgcttaagcaaagcttgcattaattgcgcagagagattttcagctcttacatggcgaaatgctccaccttttgaacgtcccattggggtgcgaacaccatcaattatgacaaccttttccatttcttctctccttaagcgagttctctgatgttaacatctacttttgcaggctttggatagtaggtttcgttacgtaatgctttttgttttaagctctcaggaatttggtaaagtggccctaactctgagtattgctctgcatttgcaacaaattgtgctaatccaatggtatcgaggtaacggaagacaccaccacggaaaggagggaagcctaaaccatacactaatgcaatatcggcttctgcaggtgaggcgataatgccttcatctaagcagcgaataacttcattgatcattgggatcatcatacgagcaataatagtgtcttggttaaattcctgttttttgccgacatgatgttcaataaggctgtgaatatcgttatctacctgcttttgttttttaccacgcttatcaatagtgtagtcatagaacccatgattatttttctgaccatagcgttgttgttgatataaaagcgcaataacgtctttatcaatactgcccattctgtctgggaaaccttgagccatcactgcttgagcatgattcgctgtatcgataccgacaacatccagtaaataagccggacccattggccagccaaaggctttttccatcactttatctacagcaataaaatcagcaccatctcttaataaaagagaaaatccggcgaaataagggaagagcacgcgattgacaaagaaccccgggcagtcattaacaatgattggcgttttacccattttgctagcataactgacaatgcgattaatcgtctcttcgctggttttttcacctttaatgatctcaactaaaggcatgcggtgaacgggattaaagaagtgcattccacagaaattttcagggcgtgttagtgatttggcaagtagcgaaatggggattgttgaggtattcgaagcaagtacagcatgatcagcaaggagcgcttcggtttcagcaagtacagaggcttttactttagggttttcaaccaccgcttcgaccacaatttgtgcatcagctacactggcatagtttagggtaggatgaatagaggcgagggtttttgccatatcaacggcactcatacgtcctttttcttgacgtttttgtaacaggctgagtgcttctgtcatacccaattcaagggagttggcattaatatctttcatggtaacaggaatgccttttagtgcagattgataggcaattccgccacccatgatccccgcgcctaatactgccgcttgttttggtaagctagcatgacgttttttagtaatgcctttcacatattgatcattaaggaaaatacccactaatgctttggcaacatcggtgcgggtcagtttgacaaagttttctgtttccaattcaagtgccgcttttctatctagaaatgcggctttttctatcgtattaacggcggtcattggggctggataatgagggcctgcgactttcatcaccatgccttttgccacagcaaatgacattttatgttcaagttccgttaatcttaatgccacagttttaggttgacgagcagcttgccagtcaaatttgccatcaatggcttgctctatcagtgaaatggcacttttttttagcttatcaacagggacaatagcttgaattaagccattcttaagtgctgtttcggcattaatatctttacctgcggtaataatttctaaggcattatcaacgccaataaggcgaggtagccgaacagagccaccaaaacccggcataataccaagttttgtttcgggtaaaccaatgcgtaaatccggtgatgcaatacgaaaatccgttgctaatacacattcacagccaccgcctagggcgtagccattaatggcagaaactgtaggaacggggagatcttctaatcgattgaaaatatgattagcaaaatgtagccattgtgtcagttcttcaacgggtgcatcaaaaagtgataaaaattcggtaatatcggcaccaacaataaaggcgggtttttctgaacgtaaaataaccccttttagatcagatgtattttctaatactgttaacgcttcgcttaacattgccaccgtttttgtatctaatttattaatagaaccgctagcattgaaaacgagctcaacaataccttgcttcacccaatcggcttgaatattttcgctttgatagagcatttgtattctccctaaagtataaactggtatgaccagataattagagtgtgaatacaatgttaattaattgcaaatatttgattaaggaaatgtagggctgatcacaatgaaattatctaatatattgatttttatatgattggtttaaatgaataaatcagcataattaaggatcgtaaaaacatagtaataagtcatggtaagctatttttgctatggtgttaccctgtaaaagagttggcgtgttaagctgaataattaacaataaataaagataggtgattagtaatggaaaaattgctttctctgtatcaagaacatatcaaaacactacaaaatcgtactcgtgatgctttatctagacaccaccttgataatgtcttgattcactctggtgaacctattggtgttttccttgatgatagtgattacccttttaaagtgaatgcacactttaaagcgtgggtgccagtaactgatgtgccacattgttggttattggttgatggtgtcaataaaccaaaattctggttctattcacctgttgattattggcatagtgttgaagctttaccaagtagctattggacccatgaaattgagctgatccatttaaaaaatgtcgatgatattcaaaaagagctagcaccttttattaataaaaatactgcttatattgggccaaatacacaacgggctgattcattaggtgtcagtcttgataatgttaataaccaatctcttcttaactattatcattattatcgtgcttataaaacgggttatgaactagcatgtatgcgcgaagcgcagaaaatggcagtcaatggacatatcgccgctcgtgaggcattccaagctgagttaagtgaatttgatattaatatggcttatttaatggcaacaggacatcgggacacagatgtaccttatggcaatattgttgcattaaatgaacatgctgctgttttgcattacaccaaattagatcatcaatcgccagatgaatatcgtagtttccttattgatgcgggagcagagtataatgggtatgctgcggatattacgcgtacttattcagcgaaagaaaatcatgaatttactgctttagtcaaagatatgaatgatgcgcaacaggcattgatagcgacaatgaaagcgggagtacgctacagcgaatatcatattcaaatgcatcaacgtattgccggattattacataaatacggtattgttaagggaattagcgaagaagagatggtgagtgaaggattaacaactcccttcttaccacatggattaggccatgcgctaggtttacaagttcatgatgcgggtggatttatgcaggatgataaagggactcatttagctgcgccagccatgtatcctttcttacgttgtacacgtattgtagagccgggaatggtacttaccattgagccaggattctattttattgattcgttattagcaccttggcgtgaagggaaatatcgtagtcattttgattggcatttgattgaacacttcaagccttttggtggcattcgtattgaagataatattattatccacgataacaaaattgaaaatatgacaagagacttacatttagcctgatgaaagcttatttgatccccgctgaaacggtagaattcagtgaagaaataaagaagagccgttttattacatttattgctcatactgaagggattgaggctgccaaagcgtatatccaatcaattaaagcgcagtttcccgatgctcggcatcattgttgggcatttgttgccggaagacctgatgattcacaacagttaggtttttctgatgatggtgaaccaacaggcacggcgggaaaacctattctagcacccctgttagggagtggtatgggagaggtgactgcagttgtggtacgttatttcggcgggatcaaattaggcactggtggattagtacgtgcttatggcagtggggtacagcaggcattaaaacttttgccaacgaaaaccaaagtacctcagcgccgatttcttgtggagtgtgaatattccttagtgtcattacttgagcaagttattgcagaatatcaagggaagatcctctctagtgaatatactgataaagtcacttttgaactatcattgccagcagtagagagtgaaaaagttgaaagtaaactacgcgatatcagtcgtggcagtatgcaattaatatgtttagaaccgaatgaataatcgttgctaccaaggaaatcgctaaatgcattttcgttcaataacccgaattgttgggctacttgttattttattctctgtcacgatgatcatccccggtatcgttgcgttgatctatcgggatggtgcaggacgagcatttagtcagacatttattgtcgctcttattattgggctaatgttgtggatccccaatcgaaacaataaaagtgatctaaaacccaaagaaggttttcttattgtggttttattttggactgtgttaggcagcgtaggggcattgccttttattttttcggaacaacctcatctatcgattaccgatgccttttttgaatctttttccggattaacaaccacaggggctacgacacttgttgggttggatagcttacctaaagcgattttattttatcgccaaatgctgcaatggttagggggaatggggatcatcgtattagcggtggccattcttccactgttaggcgttgggggaatgcagctttatcgggcagaaatgccggggcctttgaaagacaataaaatgcgcccaaggatcgcagaaactgcgaaagcattgtggctgatttatgtcttactcactattatttgtgcccttgcgttgtggattgcgggtatggacgtgtttgatgctatctcgcatagtttttctactattgcaatcggtggattttctacccatgatgcaagcattggctattttaatagtccaacaattaacgtcattattggtgtttttctattaatttcagggtgtaactttgctttacacttttcggttttaacagggcgaagcctcaatatttattggcgagatcctgaatttcgcatgtttatctttatacagctcggattagtgattatttgtagccttattctatggctctattcggtatatgactctggatggacaacaattaatcaagcttttttccaagttgtttcaatggcaacaaccgcagggtttgcaacagatagttttgcccagtggccaacttttttacctctgttactgttgtgctctgcctttatcgggggctgtgctggttcaacaggggggggattaaaagtaatccgtatcttactgctatttttacaaggctctcgtgaattaaaacgtcttgtacaccctaatgcggtttatacgattaaactaggacatcgagcattaccagagcgtattatagaagcggtttggggctttttctcagcatatgctttagtgtttattattagcttaatgctgttaatagcgacaggtgttgatgagttttctgctttttctgctattgctacaacacttaataatttgggtccaggattaggtattgttgctgataactttacaacaatgaatccagccgctaagtggatacttgttgtcaccatgttatttggccgattagaagttttcacattattggttttatttacaccaacattttggcgtgattaaccaaaaacaaggagtgatgtatgagcgcgctgttgctgtactgcagtacagatggtcaaactaaaaaaataatgacgcacatagctaataaactaagacaacagggctatgaatgtgatgtaagagatttaactgctgttcaccatagccttaatttatctgcttataataaagtgttagttggggcatcaattagatatggctattttaataaagtactggataaatttattacccaacacctttctcaattaaatagtatgccatccgccttctttggggtgaatcttacggcaagaaaagctgaaaagagtacgcccgaaaccaatgcttatatgcgtaagtttttagataagactccatggaaacctagattaacaggtgtttttgcaggcgcgcttctttacccacgttataaatggattgatagagtgatgatccagcttattatgaagatgactaagggtgaaaccgatccaacaaaagaaatcgaatatactgattggaataaagttagcgaatttgcgacaaaattttccaaaattgagtgatatttgttcgttgtgacctgttttttgtacgcattgttggggttttaatcgaacggtaaatttttttcaaaaaacacttgcgctaatctgagaagcccctataatgcgcacccactgaccgacgatgagctgacaacagcaacgacggaaagggaagagaaaagaaaaaagtttgaaaaaactcttgactcttcagaggaatagcgtagtatacgcctcctcgcaacaacgcagaagaccggaaacggcagcgacagttgcactgctctttaacaaattatcagacaatctgtgtgggcactcgcagagacgatatcttctaaaaaaattagatgtatcaagtcttgaagagtgactaacaagttaattcatataatgaataagctaagttttcgatttctttgagcatcaaacacttttaattgaagagtttgatcatggctcagattgaacgctggcggcaggcctaacacatgcaagtcgagcggtaacaggagaaagcttgctttcttgctgacgagcggcggacgggtgagtaatgtatggggatctgcccgatagagggggataactactggaaacggtggctaataccgcataatgtctacggaccaaagcaggggctcttcggaccttgcactatcggatgaacccatatgggattagctagtaggtggggtaaaggctcacctaggcgacgatctctagctggtctgagaggatgatcagccacactgggactgagacacggcccagactcctacgggaggcagcagtggggaatattgcacaatgggcgcaagcctgatgcagccatgccgcgtgtatgaagaaggccttagggttgtaaagtactttcagcggggaggaaggtgataaggttaatacccttatcaattgacgttacccgcagaagaagcaccggctaactccgtgccagcagccgcggtaatacggagggtgcaagcgttaatcggaattactgggcgtaaagcgcacgcaggcggtcaattaagtcagatgtgaaagccccgagcttaacttgggaattgcatctgaaactggttggctagagtcttgtagaggggggtagaattccatgtgtagcggtgaaatgcgtagagatgtggaggaataccggtggcgaaggcggccccctggacaaagactgacgctcaggtgcgaaagcgtggggagcaaacaggattagataccctggtagtccacgctgtaaacgatgtcgatttagaggttgtggtcttgaaccgtggcttctggagctaacgcgttaaatcgaccgcctggggagtacggccgcaaggttaaaactcaaatgaattgacgggggcccgcacaagcggtggagcatgtggtttaattcgatgcaacgcgaagaaccttacctactcttgacatccagcgaatcctttagagatagaggagtgccttctggaacgctgagacaggtgctgcatggctgtcgtcagctcgtgttgtgaaatgttgggttaagtcccgcaacgagcgcaacccttatcctttgttgccagcacgtaatggtgggaactcaaaggagactgccggtgataaaccggaggaaggtggggatgacgtcaagtcatcatggcccttacgagtagggctacacacgtgctacaatggcagatacaaagagaagcgacctcgcgagagcaagcggaactcataaagtctgtcgtagtccggattggagtctgcaactcgactccatgaagtcggaatcgctagtaatcgtagatcagaatgctacggtgaatacgttcccgggccttgtacacaccgcccgtcacaccatgggagtgggttgcaaaagaagtaggtagcttaaccttcgggagggcgcttaccactttgtgattcatgactggggtgaagtcgtaacaaggtaaccgtaggggaacctgcggttggatcacctccttacctaagagatacgtgttatgtgcagtgctcacacagattgtctgatgaagaacgagcaaaagcgcgtctgcgaagctgacagaagtccccttcgtctagaggcctaggacaccgccctttcacggcggtaacaggggttcgaatcccctaggggacgccaatgcgcggtatgagtgaaaggcgtaccacttatctgacgagagtcagagaataactaagctaattcaaacgagttatcttacttattatgctctttaacaatctggaacaagctgaaaaattgaaaacaaatcaatatatcaacgaggtatattggtgagtctctcaaaatctcaaactttgaatgtgttttgacatcaaagtgggatgagcgagcaatttacagttcgaggcggacagcgcacagcaagcgcagcatacttaagtatgtgagcattgcgagcactgcccaacgaagaaatgtaatctgcgcagccatcaccacccagatagtctttgaaagagacactttcgggttgtgaggttaagcgaataagcgtacacggtggatgcctaggcaatcagaggcgatgaaggacgtgctaatctgcgaaaagcgtcggtaaggtgatatgaaccgttatacccgacgatatccgaatggggaaacccagtatccaatggatactatcattaactgaatccataggttaatgaggcgaaccgggagaactgaaacatctcagtaccccgaggaaaagaaatcaaccgagattcccctagtagcggcgagcgaacggggagcagcccagagtcttaatcaatagcagtgtcaggagaacggtctggaaagtccggcagtaaagggtgatagccccgtatctgaagatgctgttattgtgaactcgacgagtagggcgggacacgtgttatcctgtctgaatatggggggaccatcctccaaggctaaatactcctgattgaccgatagtgaaccagtaccgtgagggaaaggcgaaaagaaccccggcgaggggagtgaaaaagaacctgaaaccgtgtacgtacaagcagtaggagccccatcactcaagtgcctcgcactgagtgatgcaagaacatcaccgaaaatagcgccgaatttgctaacaaggttggtcgattttttcaagccgtcgcgcagtgtacctagaagtacacgagcaacggaagttaaaaaatcgggcaagattgaacgcaaaggcaagcgggacatttgaggatggggtgactgcgtaccttttgtataatgggtcagcgacttatattctgtagcaaggttaaccgtataggggagccgtagggaaaccgagtcttaactgggcgaatgagttgcagggtatagacccgaaacccggtgatctatccatgggcaggttgaaggttgggtaacactaactggaggaccgaaccgactaatgttgaaaaattagcggatgacttgtggatgggggtgaaaggccaatcaaaccgggagatagctggttctccccgaaagctatttaggtagcgcctcgtgaactcatcttcgggggtagagcactgtttcgactagggggtcatcccgacttaccaactcgatgcaaactgcgaataccgaagaatgttatcacgggagacacacggcgggtgctaacgtccgtcgtgaagagggaaacaacccagaccgccagctaaggtcccaaagtcatggttaagtgggaaacgaagtgggaaggctcagacagccaggatgttggcttagaagcagccatcatttaaagaaagcgtaatagctcactggtcgagtcggcccgcgcggaagatgtaacggggctaaaccatgcaccgaagctgcggcagcgacacaaagtgttgttgggtaggggagcgttctgtaagcctgcgaaggtatactgtgaggtatgctggaggtatcagaagtgcgaatgctgacataagtaacgataatgcgggtgaaaaacccgcacgccggaagaccaagggttcctgtccaacgttaatcggggcagggtgagtcgacccctaaggcgaggctgaaaagcgtagtcgatgggaaacgggttaatattcccgtactggtggtaactgcgatgggggaacggagaaggctaggttgtccgggcgacggtcgtcccggttcaagcaggtaggcagagtgattaggcaaatccggtcacttaatgctgagatgtgatgacgaaccaccaaggtggtgaagcaattgatgccccgcttccaggaaaagcctctaagcttcaggttaccaacaatcgtaccccaaaccgacacaggtggtcaggtagagaatactcaggcgcttgagagaactcgggtgaaggaactaggcaaaatggtgccgtaacttcgggagaaggcacgctggcggtaggtaaagtcccttgcggacggcgctgaagccagtcgaagataccagctggctgcaactgtttattaaaaacacagcactgtgcaaacacgaaagtggacgtatacggtgtgacgcctgcccggtgctggaaggttaattgatggggtcagccgtaaggcgaagctcctgatcgaagccccagtaaacggcggccgtaactataacggtcctaaggtagcgaaattccttgtcgggtaagttccgacctgcacgaatggcgtaatgatggccaggctgtctccacccgagactcagtgaaattgaactcgctgtgaagatgcagtgtacccgcggcaagacggaaagaccccgtgaacctttactatagcttgacactgaacattgagccttgatgtgtaggataggtgggaggctttgaagtgtggacgccagtctgcatggagccaaccttgaaataccaccctttaacgtttgatgttctaacctaggcccataaactgggtcggggaccgtgtctggtgggtagtttgactggggcggtctcctcctaaagagtaacggaggagcacgaaggttggctaagcatggtcggacatcatgcggttagtgcaaaggcataagccagcttgactgcgagagtgacggctcgagcaggtacgaaagtaggtcttagtgatccggtggttctgaatggaagggccatcgctcaacggataaaaggtactccggggataacaggctgataccgcccaagagttcatatcgacggcggtgtttggcacctcgatgtcggctcatcacatcctggggctgaagtaggtcccaagggtatggctgttcgccatttaaagtggtacgcgagctgggtttagaacgtcgtgagacagttcggtccctatctgccgtgggcgttggaagattgagaggggttgctcctagtacgagaggaccggagtgaacgcaccactggtgttcgggttgtcatgccaatggcattgcccggtagctaagtgcggaagagataaccgctgaaagcatctaagcgggaaacttgcctcgagatgagtcttccctgtcactttaagtgacctaaaggaacatttaagactaagacgttgataggctgggtgtgtaagcgtagcgatacgttgagctaaccagtactaatgaaccgtgaggcttaacctgacaacaccgaaagtgttttgtcagagagacgaaacgatgaagtcagcttgtttaagattgaattactggcgacttaccgaaaggaaagaagcgagtgattaaaaccgaatttgcttggcggccatagcgcggtggtcccacctgatcccatgccgaactcagaagtgaaacgccgtagcgccgatggtagtgtggggtctccccatgtgagagtagggaactgccaagcattaaataagacgagaaagccaacccaatgggttggcttttttgcgtttgaaaactaatcctgtgaatttaagcatgctctagatgagggcaattttactatctatttttcgttgatattaacagatgttgtggcgagaaaaagcggctaatacggttcgctcggatatttctaaataactttccatttcgattgccgcttcttgcgctttcccattcatcaatagcgttaaaatatgctcattcttctcaatataaggagcatgtaataattgaggatcattgagtaaaccaaaggctaatcgtaattctgctaaaataagttgatattgtttaaataacctagggctatcagaaagctcgacgatagcggtatgaaaatgcatattacaggttccaacgctattccaatctttttgttgttgaaacatttttgcttgattaacgttatcttgcatgcgggaaatggctgggtgcattggataggcatgtcgtaaagcatcacattcaatcagccttcttacgcgataaatatccataattgatgccatatctggtacagaaacaaacacaccacgattaggtttataggttaataggccttcttgggttaatatacgaaatacttctcttaatgtattacgagatatttcaagctgctcgcttaaagtagcttctgaaagcctctctcctggaggtaattcgccgatagtaattttttggcgaataatatcagcgattttttggcaaaggatctgtggtgatgtttttttctgcattatcttctgctataaacgtaatagaagcctctattctaacagtcagctatataatatataacctctaatatacaactgtgctagtttcctcactctctttatccttgtttttattaaaaatagttaacaaaattattaataaatttttatattatcaactgtatttgatgccaaaatgtatgcaccaattttgcgcataactcttttttatgcgctattttggggcatatctattttttactctcccactcaaatgtcaataaaatgttaaaaatgagatcttgttggcacttttatcatcgtatatttaaatctatttgcttatttattcatctattattattaattgttcaacaatctaatatctattgattaacaattattactccgtgctcaacaatggcatgctaattgccttactacttacctaagcaataataattaaaataattatgataaaagggggcctgttatggctacacaagatcctgtgaatacaacatcaccatcatttataaaaaataggcgttcatcattaattgcagcgatttttttaatggctacatctgcaattggtccaggttttattacgcaaacagctacctttacagcgacgatgggagcagcctttgcatttgggatattagcttctatcgtcattgactttgttgtgcaacaaagtatttggcgagtcattaccgtgactaacatgcgcgcttctgatattgcgaataaggcaattcccggtagtggatacttattagctgtattggttatttttggtggtttggtattcaatgtcggtaatattgctggggctggtttagggcttaatgccatggtaggactggatcctaaatggggtggggttttaagtgctttactggcgatttatatcttctcttcacgcaaagcaagtcattttattgatcgtatgatcattgttcttggcatcgtgatgattttattaacactttttgtaatgtttgcgtccaatcctcctataggtgaagcattaaaacaaacagtactgcctaatacgattaattttgccactataacaaccatcgtcggaggtacggttggtggttatatttgttatgcaggagcacatcgtctgctcgataaaggtacaacaggtattgaaaatatcgatgcggtatctagcgcggcaactaaagggatattagtggttggattaatgcgttatatcctatttttagcaattttaggtgttgtcgcaagtggagtgacactagatatttccagccatgcggctaatcctgcttctcaagcattccaacatgcagcgggcttaactggactacgaatttttggtcttattttatgggcagccgcactgactagtgtgattggtgctgcttatacgtctatgtcgtttataaccgtgtttaaaaagggtattacagagcgtcaacgcaatattgctactattatttttatcgctatttcattggcaatttatatggttatgggaacagctcctgctgccttattagtctttgctggtggcttcaacggattgattttacctattggtatgacgttatttatttttgttgcatggcgtcgtcaagatcttatgaatggctataaatatccaatgtggttgcaatggtcggcaattttagtctgcgctttgacttggtatatggggatcatgtctgttggcgctattttcaattacctcaatattgcttaagagaataataacgatgataaaagcggtagatttaaatagtgatttaggtgaaagctttggtcaatggcgtatgggcaatgatgctgcagtgcttgaaattgtcagcagtgccaatattgcttgtggttttcatgctggttcaccagaaggcattttaaaaacattaaaagcagcgaaacagcatcaagtcgcgataggtgctcatgttgcttatcctgacttagtgggttttgggcgacgcaatatggatattgccagtgatgaattaaccgctgatgtcatttatcaaattggcgctttgcaaggtttagcgaaagccgtcggtatgaaggtaacttatgttaaacctcatggtgcgctttataacaccattgctcatgataaacgccaagcattagcagttattgaagctattttagctattgatccacaacttattttagtggctttagcgggatcaccgttgatcacacttgcgaaagagaaagggttacgtgttgttgccgaagcttttgctgatagagcttatcatgctgatggcacacttgtttcgcgcaaacaagagggggctgtattacacgatcctcaattggtggctcagcgtatgttaaagctagtacaaaaagggggcgttgaatcgatagagggtacttttactgctatacaggcggattctatttgtgttcatggtgatagtcctgatgcggttaatctcgcaaaaagtgtcaaagagatcttaataacacacggtattgcgataaaacctttcacatctgcaataggaataaaggaggcgtaatgacttattttatgcaagcaacgcctgatgctattacagcagccgctcgatccgttattggcaataaaagggaggcgtattttgcgctttttacctgttaatttatctcacatattagttgagttgacttcattaaaagagacattggcgttttatgaagcaattaagcaagccaatattgctgagatagaagatattgttcctgcggcaaaaacactattgatccaatatgtaccttggttaattacggcgaaagagttagtggcaatattgcgcaatatcgagataaaagcgatcgcgatgcgtcaaagtcacttattaacaatccccgttcattatcaaggagaagatctgcatgaggtggctgaattattggggatcactgcgacagaggtgatccgcagacacacagaacaaacttatcaagttgcttttacggggtttgcaccgggatttgcttatttaattgctgataaaactgagctttatgttcctcgacgtaaaacaccacgtacacgtatccccgcaggctctgtaggattagcgggagaatttagcggtgtttacccacagcaaagccctggtggctggcaattaattggtactacagagataaaaatgtgggatctctcacgtgaacagccggcatttttattacctggtgatactgtacagtttgttgatgtacaaaaagcgccagtgacggtttcattacctgagaaaaaacaatctattaatgctttatcctttaacaaggataaagggctatatgttatttccgcaggtctacaaaccttatttcaagatgaagggcgtttaggtgctgcatcaatgggggttagtgcatcaggagcacttgataaatgtgcgttacatgcagcgaatcgcttagtgggaaacccgccttcattagcagcattagaaataacacaaggtggattaatactaaaagcgcaacaagactgtgtcatagcgctgtcaggtgcagattgtacgatcagcttaaaacaaacgaccggagatatagcctttttctctacttatcaaactattgatgtacgtagtggagatgaaatcactgtagggatacctacagcggggattcgtagttatctggcagtgagagggggttttgaattaagcccagtgttaggtagttatgcgtttgatactttagctcagattggccctcgagccttacaaaatggcgatgttcttcatctaaacgatgataacgcatcaacgggcattattagccaagagcaaccgagtttcagtttaccaaagcaagaggatatcgttacccttgatattgtgttaggacctcgtacggattggtttacagaagatgcgataaaaacattaacctcacaattatggcaagtgacaccacaatctaaccgtatcggattacgtttattgggggataaatcgcttgaacgtcagcaacaacaagagttatcgagtgaaggaacttgcattggtgccatacaagtaccgattaatggtcaaccggtattatttcttcatgatcaccctctcactggaggataccccgtaattggggctgttgccgaataccatctgtcattggcggggcaaatccctattaacgctaaaattcgttttaacccaattactttatttcaagaatattgataggagtatgccactcatgataacaactaaccaaaagcaacgagtgaagcatcgagtgttgattgctaacagaggtgaaatcgcagttcgtattattcgtgcttgtcaggattatggtgcaacgtccattgctatttatgcagatgatgatatagatgcattacatgtgcgtcttgcagatgaagcctatggtttaaagggtaactcaccgaaagaaagttatttagcgatagataaaatcattgaaattgcccataaaagcaaagccaccatgatccaccctggttatggcttcctttctgagcgagctgatttcgctaaagcggtacagcaagcgggactcctttggattggcccagatccacagactatcgaagtattaggggataaagttcaagcgcgtaaaattgcacaatccgtaggtgcaccattggtgaatggtactgctgatccggttagtgatgctaaagaggttctggattttgcgaaacagtatggcttgcctatcgccattaaagcggcatttggtggtggtggacgaggcctaaaaattgcccatcatatggcagaaattgaagagctttaccattcagcggtaagagaagcagtaaccgcatttggtcgtggtgaatgctatgttgagcaatttcttgataagcctcgccatattgaggcacaaattattgctgataaattaggccatgtcgtggtagttggtacacgagattgttcattacagcgccgtaatcaaaaacttattgaagaggcccctgccccttatttaactgatgaacaacggcaacgtattcatcaatcagcaaaagacatttgtgctaaagcaggttatatcggtgcggggacggtagaatttttattgagtgcgaacgggacaatctctttccttgaagtgaatacacgtctacaagtagagcatccggtgactgaagaaacagccggtattgatttagtgattgaacaattgcgtattgctgagggattaccgttaagtattaatgaaacccctgagcctcgtggccatagttttgagtttaggatcaatgcagaagatccggcaaaaggttttttacccacccccggtttaattagccaatttagtcaaccggctgggccgggcgttcgtgttgatagtggtgtggcggaaaatgaccaagtatcacgtcaatttgattcaatgatggcaaaacttattgtaacaggggcaagtcgtgaacaagccattgcgagagcgcgacgagctttagctgaatttaacatcgcaggcgtagccagtgtattaccttttcatcgcaaaatgatggaacatcctgattttattgataacttcagtgttcacactcgttggattgaaagcgattttcaagcacaaaaaagtcattttcctcgtagtataccagcagaaaatgaaccactagtgcgtacctttattgaaatagatggtcgtcgtcatcaattagcgctacccgcacaattactttctctctcggccgttatacccacggctattagcgagcacaaagagtgtcaggtgcgggaaaatgcggtcactgcaccgatttcagggatattacatagttggttattatccgatggtgataaagtcaatcaaggggatgttattgccattatggaggcgatgaaaatggaagtacaggtagttgctacctgtcatggtgtattgcagcaaaaggcgaaatccggtgactatttttcagcagacagtctattagctgagattaactagctgagttatcaaactattatcgagtaagcctcttagcaataagaggcttttttataataaccgtctttatattcttatttgttatatctaattccttttggttataagttattttgcttataatcgaaactgaatatgttttctacaaaaggaaattagatgctgctggtcactcaactccttattggttctgcgataggtttagttatcaccacaacgggagttgggggtggtgttatcttattacctgtgcttatctatttatttggaatgaatgcattagcagcagtggcgaccgctaatttattatcgatgttaatgaaaatttcctcttcttatattcattttcgtttaggaaatattccattaaaaccagcattattgattttagggatcatgtttccggccacatttttagccagctatggggtaacctggttgggatcacaacctcaatattatgagcaggttgaattaggcattaatatcctgatgattgtggcgattatcttttcaatgttcctttttttacaacgaatattcaaaaaatccacatcatcacatccgttatcatcattggcacctagctcatcaattcctctgaattctctttttgttcccggtatgagtgccggatttgtcttaggggcaacgggggttggtggaggattggttgtcttacccgtgcttatgcgttttgcacaaatgaatattaaggaagcgatcggtagttctatatttattactacaattttgtcaggtggctctgctattgcttatagtgctggtggctataccgatgtgcatacggccatcattctttgtttaggatcacttatttcgattcctttagcgcgctatttactggtgtatttatctgagcgcttttttcaatatttaactctgttatttattctgatcagcatcattatgatgagttggaaactaatatattgaataaaataagaaaaaattttttctcatttattaatgacattaataggacaaaaatataaaatattcttatgaatttcgatgggaagataagaatgagagatattatattagataaagccatttattctcagtgggttataagaaattctttatattggatgtctatttatagtaactggcttctagaagaaactgatgaacaatggaaaataacatttaaaaataatgatgaatcagtattgtttgaatttaataaattgctgaatgattatattttaagagaaataatagaattaaagacaggaaaatttagagaatctgttattaataaagtacttgcaagtatgaatgaaaggttaattacatgaaactattgccatttaattttgaattaattgatgaaaataagtattttatcagtaatttggcagggtttagccatgtcttaaatcagatggatttatctaatattatagattttggtaaaagtaataatgataacttaaataatatacttaggaataagttatttattactaatgatgatattcaactttctgaaatgatgatagcatcgggtttgggaaaaaaattaatgtcagagatgacattttctccgatatttatgattgttccaacattacgctgtgatcatacttgcaagtattgtcaagttagtagagcctctataagtgcacaacattatgatttagatgagaagaatatccctaaaataatttcattaataaaaagaatatcaaaaaaaaactataaactagagattcaaggtggtgagcctttaataagatttgatttaatcaaaaaaatatataatgaggcagtattccaacttggtcaagagaatattgagtttgtaattacttcaagcctttcattactcacagatgaaatgattgaatggtcagaagaaaaacctgtaatctactcagtatctttagatgggaatgaatatgtgcataataaaaacaggatattacctacaaagaactcatttcaaataatcacagaaaatataaaaaaactacaacatagattaggtcgcgatagagtttcaacagttactacagtaacaaaggaattgcttcataatcctcaatcactgattgatgctcattttgaattagatgtatttgatctttttattaggcctataagcccttatggatttgctgagaaaaaagaaagctacacaatatctgagtatattaatttttatgaaaaattattagatattattttcgaggaaaataaaaaagggcttccttttgttgagcattctggtgctatacatataaaaagattatataatcctggtttttgtgggtatgctgatttaaaatcccctagtggtatagtatttaatagcttattattcaattatgatgggaaagtatatggaagtgacgaattaagaatgcttcagcaggtatactctgatattgacttttctttaggtgactttgattcgttatcatttaataaaaacactatctataataatttactttctaattcatttaacatgctacatgttggttgtgaaacttgtgcttttcagccatattgtggcgttgacccttgtcaaaatatcagtttatttggtgagccggttggaaataaaagtctttcacgattttgtctttatcataaagggatgtttaaactactagtaaaaaaaattgatgaagataatgcaggggctacattactaaaaagttggatttatgcttgaggttattaggaaagatttattcgatattagaagtaaattagacaatggctactatcaaatatttaaagatagactggtagatcctacattctatttagataatattcttgttcaacaagaaggaaagattttatcgtcgacactctgtaacggtgcaaaatatataatagcagatagtgaactttataatagtattgaaaatggtgatattatatctgtttcaaatagtagaattagagttattttatctcgcaaggcaaatcataatacgttacttgttactgagcgttgtaataatttatgtcaattttgttctcagccccctaaaaatagagatgattcttggcttttagatgatgctctacttgcgattgctgcttttaatttcgatggtgttattggaattagtggtggagagcctttactttatggcaataaatttattgattttattagagaaataaaaagattggcaccgaggacagttttacatgtattaacgaatgggcgaaggttttctgatatttattttacaaagaaattattatctgaagcaaaagatatgaatatttcatttgggatccctctttattcatctcataaagaaattcatgatgagttagttgggcataatggtgcatatgaagaaacaattatgggaatagtaaatgcaggtaatttaggcattaatattgaattgagaataatcccaacaaaaataaattatcttcactttcataatattgttgaattatgtgctagagtgttctcaaatattaatcaaatttctattatgaatcttgaacccgttgggtgggctaaaaaaaattgggataatttatatatctcacctgataaatatatagaaaatctgaatcttgctatcaacatggctgatattagtcaattacctatagctttatttaattatcctttatgtcatttacctaatagtttatggaaatatactattcaatctatttctgattggaagaattattatccgaatgaatgtgaccaatgtaaaatgaagagtcattgtggtggatattttagttcttcatatggaaaatatcatcaaacagcgagggcgatattatgaaaaagtggagtttagcagcactattacctggttttttaacgttaaatagtcaagctgttgctagttcaacagggctacctaattctgaattaacatttgaacctgaagatctcgtgtttgctcctttaaatacagaaacaccgttttatatagcagggcatagaagccatagttctcatcgaagccatcgtagtcatagctctcatcgctcttcatctgggggaggatattatcgaagtaccccttctacacaaagttattctcaaccacaaacaaccaatagaacaacttctaatttatctaataatgatttttcacaagcagttaagaattctaatgttaatcaggaacaaaaaaagcgcctgataatgagggtacaatatgccctatttgaaagacattattttaatgggatcattgatggtattatggggccaacaacacgtcaatctatacgtaactatagaagagatgcaaaattacccgctaatgtattaattgatgtagatttattaaattcattgggaatttatgcaacttattaaaagtatcaatggtaataatcatgaacattaaagtcggcgatgagtttttggtttatatggcattgggtgaagagagctatatgaaggaatattatcgtgtgttggagttagatagcgcattatcacaagtgaccggtaaattgctaagaaggacgacggcagatgataaaaatattgggttagggcgctgtgaattagaaggtgggattgaacaatttgcgttagaagatatttatccaatagagaagtgatcgaaataacgatcacttctacatcactttattaagcaacaggcacatcttcgggtaatgctgattttggtaagccaaaaattttgtcaaatacccagttatagacaaatgtatagcaagggatgatgataataagtgcaaaatccatcaccagtgcttgccataatgaaacccctagccaccaagctatcagcggaataaggtaaaccaccaacgtaagctgaaaacctaccgcatgagcaagacggcgtctaaaggtgcgaattctcgacttttgtcgactctcccaaaattcaaataaacagttataaataaaattccaacttaccgcgatagtggtaataatgagtgcgagtggccccgtaacagcggttgaactatcggctaaaagcgccagtcctaccgatgagataacccaaccaaatacttcataagcggtaacatagacaatttttcgcttaataccttgcatgatactctctttttttgtggatcagtgtggttaagcatcgtaagataaatcagtaatagtgacagaaaaagttagctaatatcaatttaactgaaacatcaggagtgaacatgcagttctcaagtgaacatatcgcgatatttttagccgttatggataaaggctctttttctgcggctgcgcgttcattaaaacgtgttccttctgcggtcagtatggcgattgctaatatggaggctgaattaggttatgcgctgtttgagcgttcatcgagagagccacggccaacagaaaaagctaaagcacttgaacctcacgccagaatgattgctgagcaattaaagctattacaggttcatgcacaagagctttcaatggatctggaaagtatattaaatattggtgtcgcggcagatattaatcccgattatttattaccggcattatctgagttaacacagcgttaccccttactaaaagtgaatgtagtaaccgcggcgcaagatgacattattgagatgctgcacgcacgtaaaatccaattatgtctcgtgtatggtgggttatacgtcaatggcgatgaacaatttcaatatttgggctctgagtcattagttgccacaatttcggcaagtcatattgcacttgctcaccctgcaggggtatttattgaagatttagtgaatgtaagacagataatgatagccagccatactcaagagataagagatgtacgctctttagtggcgactaattactggcaaacagataactttcaaatggcattaggtatggttgaagcggggatgggctgggggaatttaccttattcgctgatttatacgcagttacaaaagggaaaattaaaacaactgcaatttaaaaatactaaaaatgaattgcgcttaccggtacatgcaatgtggttaaaaggcgagtcactacaaaaaggggcaaaggaattggtggagttaatgaatattcaccaacccattgtgcccaattttgattaatccacacgttgttgatgaacccaaaccgcgacttcaacacgagattttaatttcatctttttgagtagatgtttgacatgtactttaacggtactttcagtaatatcgagtttacgtgcgatcatcttattggatagctcttgtgctatcagctttaaaatatcgcgctctcgtggggtgagttggtctatatcccgctcactttcagaacgatcttctcgcagtgactgcgctaaaatgggggttaatgttgggctaaccaccattttccctgcggctgcttgttttaaagcggctaatagctcttctggctccatgtcttttaagagatagccatccgctcctcgttttaaggcggtgatcagatcatcactgtagtttgatacactaaacacaacgatccgcccagagagcgatcgtaatcgcaattgatcgagtgtttcaaaaccattcatacccggcatattgagatcgagtaggattaaatcaggatctaactcttcagctaattttaccccttgaataccatcgccagcttcaccaacgacagttaatgttgtatcaagacttaaaagttgtttcacaccattgcgtaacatcgggtgatcatcaattaataaaatagtcgctttgtctgcgactgctcccatattattcattatgatttgctcccttttcgataggatctttatgggtagtgattaacggaaatgtgacaaatacttgcgttccaccttctttgcgaacccttatactataagagccattcagactattcgcgcgttcacgcataataatcagtccgtagtgatttatcttttcgggattaggcgtaataccttcaccattatcattaatttgcagttcaacgatgccattattaagtgttaatgcgacttcagcccagtttgcattcgcatgttgcagaatattatttaatgcttcacgaacaatttgcaccacatgaatactttgatgtgaattaacacattttgcaggtaactgataatcaaaatggatagcaaaccctaaacgttgattaaattcatttagtgtattttctaatgcggctaataagccaggctctgtcaatttcaagcgaaatgtggtcagtaattctcttaactgacgataagccacatttagctcttctcgcatctcttttagtagtttttgacagttatctggcaaggtttccgattgcatttgtagataactgacctgcatttttaaacatgatagcgattgagcaatcgaatcatgtaattcacgtgcaatcgctgaacgctcatccattaataatagctgttgttgctgttcattttgttgctccatggcaagcattgcggaaatttgcttagtcaataagagcattaaattattctgttcgtcagtaagtacactattttccggtaactgcattacgaataaaccgtagcgatggatctgatcggtcaattcccaatgtaataagcgattatttaacggtgtagtgatgttggcatcttcattgcaacgctcacagtctggcgttggacaatattcagggcgtgaggaaggggctaagcttatctcattaaataatgtatgttgattatcttcatatagacggatctgcaaatagctatcaggaataatatgctgtagctctgcaaggatctgccttaagcgagcgcaaagtggcgcttgggaatgcagttgttgacttgagtgataaagataagagagaaccttatttttctgttgtaaatcatgggtcttttcaatgactcgttgttctaattcactgtagagcgtcgatagctcttctgacatggtgttaagtgcaattcctagggtggcaatttcatcatggtgaggacgaggccgaaaacgagttgaaaaatcaccatgtccaatagaattagccatggacatcaattgttgccaaggcagtaataagcgacgacgaaaatgccaaacagaaccaaacagcagtaataaggtaagagcggtaaagataagttgagtataagcgactaggcggattttttgttcagtaagttggtcaatacttgatactaatgtatcgagttgagaaacaaaaaagataacttcttgtttcgcatcattaggctgtttggctgctgacaaagtcggttttaatgtctctttccagtaatgagtcagttgtacatattgtgattgcagtgatgaggtgcttaatacttgacgtaactctttactatctaaatcattttctaattcttgtagataatcacggtgcttatcatcaaggggtaaggctgagagtaaacgatagctttgcatgcgcagtgagccggatttattaatggcgtgggcattgccttgtacgcttaaaataatgtggttagaaatagccatacctaccacaccaaatagtgtgaaaagcaacattaaaatagcgatttgattaataattgaaaagcgataatgccattgaatgttgtgcattttcatgatgtattcccagtttgatctggtctatcttgccttaaaaaaccgctaaataacatatactccaaagggagtacctctaaatatctaagtattgtaatgtgtttaataaagagtaagtgattttacctaatttattgatttacatttaaaatagtcacgtaaccctattaatacttaggtataaaacatagatttagatgaaaaatcaaacaaaatcttgcttgatgcagatcatgactcgcaaacccatctcaccgtaaaaagaagccaatttaaccgttaaccgaggttgttatggcactttctcaacacccagaaaaaatgaaaaaaggggtgatcgaaaattggcatcctgaagataaagctttttgggaaaaaactggtcaaaaaatcgcatcgcgtaatttatggatttctgttccttgtctattgctatccttctgcgtctggatgctatttagtgcagtcgctgtcaatttaaataaggttggctttaattttaccactgatcagctatttatgctgactgctctaccttctgtttcaggtgcgctactacgtgtcccttactcttttgttattcctatttttggtggtcgtcgttggacggctattagtacggtatttctgattattccttgtctctggctagggtttgccgtgcaagatctcacgacatcttattccacttttatcgttatctctctgctgtgtggttttgctggtgcaaacttcgcatcgagtatggcaaatatcagcttcttttttcctaaagcacaccaaggcggtgcattaggattaaatggcggattgggtaacttaggtgtcagcgtgatgcaattaatcgcgcctttggttgtcagtgtgggcgtttttgctatgtttagtggccccggtgtcgttcaacctgatggctcacgtttatggctagagaatgcggcgtggatttgggtacctttcttgcttatctttacctttgcggcttggtttggcatgaatgatctggctgctaataaagcttctttaagtcaacagctacctgttttaaaacgtggtcatctttggttactcagtatcctctatctgtgctcttttggttcttttatcggcttttctgccgggtttgcaatgttatcgaaaacccagttccccgatattgtcattttacattatgccttctttggtcctttacttggagcattagctcgccctgtgggaggtgcgctatctgataaatttggtggcattaaagtgacgcttatcaactttatcattatggctattttctcagtgctcctgttcttaaccctaccggaaaatggtgctggtggatcgtttattgctttctatggcgtgtttatggtgctgtttttaactgcagggctaggcagtggttcaacattccaaatgattgccgtggtatttagaaaaatcactattgatcgcatgaaggcacaaggggcttcagatgaagctgcgcaaaaagaagccgtaacagaaagtgcagctgcattgggttttatctctgcaatcggtgcgattggtggcttctttattcctaaagcctttggtacatcccttgcgatgacgggttcacctgctggggcaatgaaaatcttcgttctgttctatatcgcctgcgttctgatcacttggttggtctatggacgtaaacacaataaataataatgacgaattatacgcaatgtgagcgcgctaacgcgcattgggagagtatctgatgagtaaatttctcgatagattccgctattttaaacagcttggtgatacgttttcacaagatcacgggcaagagttaaatgttaatcgcgactgggaaaatagttatcgtagccgttggcagcatgacaaaatcgtgcgttctacacatggtgttaactgcaccggatcatgtagctggaaaatttatgttaaaaacggcttagtaacatgggaaacccagcaaacagactatccacgaactcgtcctgatctgcctgatcatgaaccccgtggttgtccgcgtggtgcgagctattcatggtatttatatagcgctaaccgcgttaaatacccaatggtacgtaaacgtctgatcaaattatggcgtgaagccaaagcgcaacacgctgatccagttgatgcatgggcatcgattgttaatgctcccgaaaaaacgaaaagttataaacaagctcgtggtcgtggtggtttcgttcgctcttcatggtctgaagtgaatgaaattattgctgcctctaacgtctataccgctaaaacttttggcccagatcgtattattggtttctcacctattccggcaatgtcaatggtgtcttacgccgccggtgcccgctatttatctcttattggtggtgcttgcttaagtttttacgattggtattgtgatttaccacctgcctcaccaatgacttggggggagcaaacagatgtgccagagtcagctgactggtataactcttcttatctgattgcatggggttcaaacgtacctcaaacccgtacgccagatgctcacttttttaccgaagttcgttataaaggcaccaaaacggtagcagtaacacctgattatgctgaaattgctaaactgtgtgaccagtggttaaacccaaaacaaggtacagatagcgccatggcaatggcgatgggacacgttattcttaacgaattccacgttaaacgccaaactgaatactttagtaactatgtgcgcatttacactgacatgccaatgttagtgatgttagataagcatgattctggcaaattagttgcgggtcgcatgctacgtgccgctgatttagtgaacaatctcgatcaggagaaaaatccagaatggaaaaccattgctattgatgagaaaacacagcaattggtcgctcctcaaggttcaatgggttttcgttgggaaggcgctgccaaatggaatctagagcctaaagacggtaagagtggcgaagaagtcactttacaattgggtcttttagaaaatcatgatgatgtggttgacgttgcatttccttactttggtggcatcaagagtgaatactttgaaggtgttgcccttgatgatgttctcgttcatagactgccagcaaaacgcattactcttgccaatggcgaagaaaaatatgtcactaccgtttatgacttattactggctaactatggtgtcgatcgtggtttaaatgatgaaaactgtgcgacaaactatgatgagatcaaagcctattcacccgcatgggctgaacaagtaacaggggttagccgtcaagatattatccgcattgcacgtgaatttgctgataatgcagaaaaaacacatggtcgttcaatggtgattgtcggtgcgggcattaaccattggtatcacatggatatgacctaccgtggcattatcaatatgcttatcttctgtggttgtattggccaaagtggtggggggtgggctcactatgtgggacaagaaaaactgcgtccacaaacaggttggttgccattagcttttggtctggattggcagcgtccacctcgtcatatgaatagcacgtcatttttctataatcattcaagtcaatggcgctatgaaacggtatcaccgacagaattactatcacctttagcagataaatcacgctttagcggtagcttaattgatatgaatgtgcgttcggagcgtatggggtggttaccgtcagcaccgcaattaaacgttaacccattgtctattaccaagaaagctcaacaagctggcgtcagtgcaacggattataccattaatgctctgaaatcaggtgagatccgttttgcatcagagcaaccggataatccgcaaaacttccctcgtaacttatttatctggcgttctaatttattgggatctgcaggtaaagggcatgaatatttactgaaatatctattagggacggaaaatggattacaaggtaaagatttaggtgaacaaggccaagttaagccacaagaagtggaatggcaagataaaggcggtgagggtaaggtcgatttagtggtgactttagactttcgtatgtcaagtacctgtctgttctccgatatcgtgttaccaaccgccacatggtatgaaaaagatgatatgaatacctcggatatgcatccatttattcatccattaaccgccgcggtagatcccgcttgggagtctaaaaccgattgggaaatttataaaggtattgctaaaaccttctctaaattgtgtgtcggtcatttaggggttgaaaccgatttagtgacacagccaatacaacatgactccgcggctgaaatggcacaaccatttgatgtcaaagattggaaaaaaggtgaatgtgaccttatcccggggaaaactgcaccgcatcttattcctgtggagcgtgattatccaaatacctatgctcgttttacctcacttgggccgttaatggataaattaggtaatggcggtaaagggatcggttggaatacacagacagaagttgatttcctgaaaaaacttaatcgcgttcgtcatgacggtgtggcaaaagggcgcccggcgattgaaaccgcaattgatgcagccgaagttatcctctctttagcacctgaaacgaatggtcaagtggcggtaaaagcgtgggatgcactaagtaaagtaacaggacgcgatcacactcatttagctaaagtaaaagaagatgagaaaattcgtttccgcgatatcgttgctcaacctcgtaaaatcatttcaagtcctacatggtctggtctggaagatgagcatgtctcttataacgcttgttataccaatgttcacgagatgatcccttggcgtactttaagtggccgtcagcagttatatcaagatcatgagtggatgcgtgcttatggcgaaagtttagtggtttatcgtccacctattgatactaaggcaatcgaagccgtgaaaggtaaaaaaccgaacggcttcccagaaaaagcgctgaacttcctgacgcctcaccaaaaatggggtattcactcaacgtatagcgataacttactgatgttaaccctcggtcgtggtggccctgtggtttggctgagtgaagatgatgctaaagagatgggtattagtgataacgattgggttgaagcatacaacagtaatggtgcgttaaccgcaagagcgattgtgagccaacgtattcctgatggcatgatttatatgtatcacgcacaagagcgccaaataaacctaccaggctctgaaataactggaatgcgtggcggtattcataattccgtgacgcgtgtttgccctaaaccgacccatatgattggtggatacgctcagttggcttatagctttaactactatggaactgtgggctctaaccgcgatgaatttgttgtggtacgtaagatgaaacagattgattggcttgatggtgaaggcgatgcttatcaacaaaccctgaatggacaggagaaggcataatgaaaattcgttcacaagtcggtatggtactgaacctcgacaaatgtatcggttgccatacctgttcagtaacctgtaaaaatgtttggaccagtcgtgaaggtgtggaatacgcttggtttaataatgttgaaactaaaccgggtacagggtatccgcaaaattgggaagatcaagagaagtggaaaggcggctggatcaaaaatattaaaggtaagttagtaccaagaatgggtaaccgtgttgggctattatcaaagatttttgccaacccagatgtgccagcattagatgattattatgagccatttgattatgactatgagcatttaaaaaatgcaccagaaggctcattacccaccgcacgtcctcgttcgttgataacaggtcagcgtatgaccaagatcgaaaaaggcccaaactgggaagatgatttagggggcgaatttagcaaacgtgctgcggataaaaacttcgccaatatgcaaaaagagatgtatgggcagtttgaaaatacatttatgatgtatttacctcgtttatgtgaacactgcttaaatcctgcttgtgtcgcgacctgtccaagtggtgcgatttataaacgtgctgaggatggtattgtgcttatcgatcaagataagtgtcgtggttggcgcatgtgtttaacagggtgtccatacaaaaaaatctactttaactggaaaagcggtaagtcagaaaaatgtattttctgttatccgcgcatcgaatcaggtcaaccaaccctatgctcagaaacctgtgttggacgtattcgttatcttggtgtgatgctgtatgacgcagataaaatttcacaagccgccagtgctgataatgaaaaagacttataccaaagtcaattagatatctttttagatcccttcgatcctgaagttattaaagctgcagaagagcaaggtattccattaagtgtgattgatgcagcccaacgttcgccggtttataaaatggcggtggattggaagctggcattaccattacaccctgaatatcgtactttacctatggtgtggtatgtgccacctctgtcacctattcaatctgcggctgatgcaggagtgttgccacatacgggggtattaccggatgtagaaagtttacgtattcctgtccaatatttggctaacttgctgaccgcaggcgatacagcgccagtgttattagcattaaaaagaatgttggcaatgcgccattataaacgcgcagaaacggtagaaggtaaaaccgatttgacagcattagagcaagtgggattaaccgaagcacaggcacaagagatgtatcgctatttggcgattgccaattatgaagatcgctttgttattccttctagccatcgagagttagcaagagaagcttttcctgagcgtaacggctgtggttttagttttggtgatggttgtcatggcagcgagagtaaatttaatctgtttaatagccatcgtattgatgccatcgatatcacttccaaaacccctcaagatgagcgccgttctgaggagaaaatatgatgatctctttgaaagttatttctctgttattggattatcccagcgaagatctctgggaacatcgtaatgagatcattgatgcattgcaggaagctgacgagcttcctgtcacgcaagtcgcaaaattaatggcgtttattcgtgaactcacgcaacaagatctgctggatgcacaagcgaattacagtgagatttttgatcgaggtagagcgagatcgctattgttatttgaacatgtacatggtgaatcgcgtgatcgtggtcaggcaatggttgatctgcttaatcagtatcaacaagcagggatcaccttaagtagtcgtgaattgcctgattacttacctacttaccttgagtatttaacgctattgcctaccgatgaaagtattgaagggcttaataatattgcccctattttggcattgctgagtgagcgtttaaaacagcgaggcagtgattatcacgctctttttgatgtattgctttgtctctcacaaagtgagttagacgcttcacaactggcggctcaagtagaaaaagagcctgtagatgatacgccggctgcattagatgccgtatgggaagaagagcaagtgacgtttctaggtgaaagtgcgcaatgtggtagtaacaatattagccagcatcagcgacgttttgcgcaagaaacgcctgttcaatatctcaacgtcggtaattcgctggatatgggagcacaaaaatgaattacgttaatatgttgttttttgatatctacccctatattgctggtgctgtttttcttatcggtagttggttacgttatgattatggtcaatatacatggcgtgcaggctccagtcagatgttagacaagaaaaacatgcgacttgcttcgaacttattccatattggtattatcggcatttttgcaggccattttctggggatgttaacgccacactggatgtatcaatcttttctaccaattgaatataaacaaattatggcgatggttggtggtggtacttgtggtgtattaatgctgattggcggcattatgctgttaaaacgtcgtttgacgaatgtacgggtaagagcaacatcgtcatttggtgacatcatgatcttaaccttgctggttgtccaagttgcactcggcttattgactatcccattctctgcacagcatatggatggtagtgagatgatgaagctggtggcatgggcgcaagctattgtgacattccatggcggtgcttcggcaaatcttgaaggtgttgcacttatttttaaattgcacatattcctaggtatgacgatttttttattgttcccattctgccgtttagttcatatttggagcgtgccaattgagtatctaacgcgccgttaccaaattgttcgtaatcgacactaaaggtatttttctcctgagttgatttgagacttttaattgcgcttatctcacccccgcccgcgggggttttttttaacttaaacaaattttttgaatgcttaaagcaataatctttagatacattatttccatagtcagcttatactcgcttttaacgacatcaagattattttttaaaatgtcattatgttatttaaatatcatgatatttaaataattatatatattttccttaatgacctaatttttattaagttacatttgatttatttaattattatatattaaaaaatcagaacgattattttaagtttctataaaaatagagtttatatttattcttataatctgagcgttgtttcttaaactataaatataatccattaattcctacatagggggagataatgaaacatacattgttaaaaacgactgcaattgctatggcattaagtgtgggagttgtgcaagcgactgaatataaagcgagtaccgcagaacatccaatcaaaatagttaatttagatgctcttgaaaatcaagtaaaagaaaatatggataaaggcgctttcggttatattcgtggtggtgctgaagacgaaaataacttgcgttctaatacaaatgcatttaataaaaaatatattatgcctcgtgcattacaagggattgaattttccgatctgaatttaaaaacagaatttttaggtattaaattagatacgcctattattcaggcaccgatggcagcccaagggcttgctcatcaacaaggcgaagttgccacagcaaaaggtatggcgaaagcgggctctattttctcattaagtacttatggtaataaaaccattaaagaagtcgcgcaagcacaaccgggttatccgttcttttttcagctatatatgagtaaaaacgacgcgtttaatcagtatattttatcgcaagcaaaacagtatggcgcgaaaggtattattttaacggttgattctcctgtggggggatatcgtgaagatgatattaaaaatagttttcaattcccattaggttttgccaatttggaagcattcgccaaaatcagtgatgataaatcaaaaacaggtaaaggttcgggtattagtgagatctatgctcaagctaaacaagcatttactcctgcggatattcaatatgtgaaaaagatgtcaggtttaccagtcattgtgaaaggtattgaatcacctgaagatgccgatactgcaattaaagcgggtgctgatgcgatttgggtgtctaatcatggtggtcgtcagttagatagtgcacctgcaaccattgatgtattgccagccattgccaaagtcgtgaataaacgtgttcctatcgttttcgatagtggagttcgtcgtggctcacatgtctttaaagcgctagcgagtggtgcagatgttgttgctgtggggcgtccaattctttatggattaaatttaggcggtgctgaaggtgttaattcagttattgagcaattaaataaagagttaagaattaatatgatgttaggtggtgcaagaaacgtcaaagaaattcaagcaacgcacttgtatacagatgctgactttaaataagccattattttaatctcagcgagtaaaaaccccatgcttaatcttaaacatggggtttttattgattagacacgacttaatatgcttcgctagctatgtcaccaaaacagagattattttgattattaatccccccatcgggtgatgagtaacctagacagcctaatatcgagtcaaaaatattatgatgatagaaagtccggttattatcttgatttcgtttgagattatcaaataactgtttattttcaggctcagctaaatagctatctgacatccacactaagaaaggcactttaaattgttctggtggtgcaatttcttttggtgtgccgtgtaagccacctttttctgaaattgactcgccgtgatctgaggtataaaacacaatggcttttttatcacgcaaggtattaagtacaccatcaataaagtaatcagtataaagaatagagttatcataagcattgattagctgctctttggtgcactcatcgtcaacgtttaagcattcaggttggtattttttaaatgcgtttgggtaacgttgcgagtacataaagtgtgaacctttagtgtgtaaaatcactaagtggttacctttagaatagtgagcaacggaatctgcgacttcgttaataagcaaagtatcatctaattctttgccaaaattactatttttggcggtcatcatctctttcatggcatagttatctaaatcaagcttattgtaaaaccaaagctcactttgcattgaaaagagttctgatgtcattcctagctgatgtaatactgagaaaatattgttctcttttaacgttcgctgatcgttattttctgtaccgttttcacgcacaaacatacattttagcgaaagttttgttgctgtatcgcaagagatacctttcagagcaatcagatttttttcttggcttaataggggattggtttgtctttcataaccgaatagccccatatgatcccaccttgctgtctcgccaataataaagaccacatagacatcttcattggcttttgacgggatataagtaaagttatccgcaggatcaaagatattctggctattaaagtgatcgtcgtactgtgttatcgcatattgaaataaaggaataatccagttggtcggtaaataggcgtaacttaaaccaccgctgtagcttggcaaatctaagttattcttgatttcataggctttttgtttcgaatctaaggtttttagataggcaaataccgcaagagcaattacgagcattttgaccgtatttttgatccagatttttttcttttgctgctgagttatatttttttctggtttcttacataaccaagttagcgctaggggtaaaatagataacccaataatccaaataatcacattagggctaatcagctcttttgataaatcgatatctgtggtgagcgtagaaataataatgccatagccaataactacatcaaagaaagagatatagtaactagcacaaacactaatgagcagaataaaagaagcgactattttaaaaaatagtgtgccacaaaaagaaataagtcgtaataagaagaaagtaaaggcaatgtttactgcaacttcacccagtatatataaactttcaatgagggagttgtgagaattctgtgtgccataacggccaatgtaaacggaaagattaagaaataaaccaatatagacagctaaaaaaagagaaactttttcttttgaaaatcgtaaaaactttaatttttgcatgttgagctattatcaaatttttggggtgtagaggtctttaagaccgcattgttgttttcaggttcagtattatgggctttttttttattgtttttcaccttttttcttgcgaataaattgttattcaaaatattaattcttaaaaatttacctaaataagaatatagcaagtcaaattatcatattgtcatcaaataatgatgtgtttagttgttaaataaaaataactaattgtatttattgaaaaataataattttattgatgagaagaatacatagagaaaatcgtgttaattagaccgattaatctttgctattactgcttgctcatcgtcgacagaaaaatcgtcattagtgtcgataattgtttcctttttgtctcttactcatcttattactgataactgtctgttatttttctttgtttttcatctaattataaaatatttaaaataatggcttatttggcacagtctctgcatagataaaggagagaatcgggtattaacctgaaagttgatgaacacaggagcaatgttgatgaaaaaagtcatcacggtctgtccgtattgcgcctcaggatgcaaaatctacctgaaggtggaaaacggtaaaatcattggcgctgaaggagccaatggtttaacaaaccaaggtgagctgtgtctgaaagggtattatggatgggattttatccatgatactaagatactgactccacgccttaaaacacctatgatccgccgtgaaagaggtggaaaattagaagcggtttcttgggatgaagctattgagtttgcgagtagcaaactacttgctatcaaagagaaatatggcgctaaagctattatgacaaccggttcatcacgaggacctggtaatgaagctaacttcgttatgcagaaatttgctcgtgcggttatcggaaataataatatagactgctgtgctcgtgtctgacacggcccttcggttgcaggtctgcagcgttcggtcggtaatggtgctatgagcaactcaatcgttgagattgaggataccaaatgtctatttgtcttcggttataatgccgcagactcgcatcctattgtcgctcgccgtattgtgaaggcgaaagaaaagggtgccaaaattattgtatgtgatccacgctatatcgaaacagctcgcttggctgatttacacttagcattgaaaaatggttctaatattgcactgctaaatgctattgccaatgtgatcatagaggaaaaattatacgataaatcctttattgaaaatcataccgagcaatttgatgagtattgccaattagtcgcaagttacacccctgagtcggtagaaaaaacaacggggttaagtgcacaaattatccgtgaagcagcgcgtatgtatgccaaagcggaaacggcgacaatcttgtggggaatgggggtaacacagttctatcaaggggttgaaaccgttcgttcactcactagcttagcattattaaccggtaatcttggtaagaaatatgttggggtaggtcctgttcgtggtcaaaataacgtacagggtgcttgcgatatgggagcactacctaatacgctaccaggctatcagtatgttactgatgcgaaagcgcgtgaaaaatttgccaaagcttggggcattgaatcgatgcctgaagaagtaggctatgcgcttagtgaagttcctcataatatcgaccatggtttaattaaagcacactatgtgatgggggaagatccactacaaactgagccagatttagccactattcgtagaacctttgaaaaactcgatttactgatagtacaagatatctttatgaccaaaacagcatcgattgctgatgttgttttccctgccacatcatggggtgaacatgaaggggtgtacacatcagcagaccgtggattccagcgtttctataaagcggtagagcctgttggtgatgttaaaacagactggcaaataatcagcttaatggcaacagcaatgggttatccaatgcattacaacaacaccaaagaaatttgggatgagttgcgtgagttatgcccgatttattatggtgcaacttacgaaaaaatggctgatttggcgtatattcaatggccttgcccaacagaagatagcccaggtacacaatatctttatgaaggcggtaagttcgatactcctaatggtaaaggtcaattctatacttgtgagtgggcgccacctattgatcaactctctgatgagttcccaatggtattggcaacggttcgtgaagttggacattactcttgtcgttcaatgacaggtaactgtaaagcattagctgcattggctgatgaacccggttatgttcaattaaacactgaagatgccaaacagttaggaattaaagatcaagagttggtttggatacgctctcgacaaggtaaggttattactcgtgctgcggtcagtgatagaccaaataaaggtgcggtatatatgacttaccaatggtggattggggcttgtaacgaactagttgcagaaaacttaagtccaataaccaaaacacctgagtataagtattgtgcggtttgtgttgagtcaattaaagatcaagctcaagctgagcactatgtaaaaacagaatataacaatattaaacgtcgtttaagagaagccgctgaaggctaactttgctgattaatatttattttctgttcgaaaaccgagcatgactgatctagatatcagtaagctcggtttttttatcgctttatgcttaggctacttgcttatttaaatgtaacgttagtggtaaatcgggatgtaattgggttgaatcaaactgatgtgatggatgagtgtctacggttggataacgggataataacacaataaaatcctgataagcagagtggtgattgtcatgcgtaaaaataggtgtaccactatgatttaactcattatccgcaattaacaatatatccagatattgggcattattatgctcatagagaacattattaggattaatatcttgccaaggtgtacctattgcttcttgaggagaatgaacacgtaatgcgccggaattattttttacattatttttattcatcatgacaatcattgtgtgatcaacaccatctttatgcaccccttcaatagaaagctcacttaacgaattaggttcagcaatgagtcttaaatgaaataccgttgaaattgatttaggggattgttgatcggttaagcggcgtggcgtaaatcgatttccttcaatcaggagcatttttaatttcaataatgcttggtaggcggtattgctttgccagcgatcgtcaattgctcgaaagtgtctttgtgcaccgctatcttcacgaataaagccatcttcttcagtgaggacaaaaggttgatactctagtcgtgaaatggttttagcctcattatcgaaaaggtagcgtccggtgcgagagtgacgaaacgacaatgtgggatcttgcgcgagataatcaccatattctatgagtgtatctatatctttctctgttgcacctaattgttttattaaatcaataactattttttgtggaataaaaacatatttattatttttatattcttcttttattttattaattttattcgtaagcaggtcattcataggtaatatgctccatggattatttatattcttataataagttagcgttaattaactagtgataataattaaagaaatataaccactaaaattatagatagggataaaaaagttgccaatggacagaaaaaaacgagtgtaacaaattaattacactcgttttacaatatcggctgtagtggtcgtaaaactaaagaatttcaggaatggaaatacctaagcgttgcatacgtgataataaggtggttctttttaatcctaattttaatgccgcacctctggcaccagccactacaccgttagtttctctaagggcttgtattatccgctcacgctcttcatcatcactttcaggtgcgctagtttgcatctttttttctatggctgatggttgcgaaagcacttgttttaaacgagatggtttattgatatttaactcttttagttgcaaatttagcgtagagcctcgagttaaaataaccgcgcgctcaataatattttcaagctctcgtacatttcccggccaaggataatgggttaattgctccaaagcatgtgttggaatacagtctatttttctatccatgcggcgggcaattttttgcgtaaaatattttgccaataaggggatatcttcaggccgctcccgtaatggcgggataataataggaaaaacattcagacgataatagagatcttctcgaaattccccttcatccgtcagttcacataaatctttattggtcgctgcaattaagcgtacatccacaggaataactttattaccacctaatctttcgatttcacgctcttggagaacccgtaatagttttggctgtaattcaatgggcatatcgccaatttcatcgagaaaaagcgtacttttatctgccatttcaaatcgacccacatgggcatgtgttgcacccgtaaaagcgcctttatcatgtccaaaaagatcactttctaacagaccggaaggtactgctgcacaattcatttttatcatcgtcttatttttacgatgacttaaacgatggatcgctcgtgcaattaactctttaccagtacctgtttcgcctaagataagtacagtactgtcactttgagcgactaactcaatttgttctagtacattatgcatggcatcgctttgataaataatctcgctaaaactaccatttctatttatttgttcattaagccaaatattttcgttcttaaggctatctttaaggtgagttatctcttcataagcggcggcattttcaattgcaatcccgatgcgcgcggcaatttgttgcaataattgacaagtttcttcagtaaaaacactacttatttcatgcgctaggattaataaacctagcggtttacggttaaaagccagtggcaataacaaagccgtctgcatattttgttttacgagacgtttaatcaaaacatcgtcttgatcttctttattgatatcgattaaaacgggtttgttttgatgaataatttcttcggctttgttattggcgctactgaacttacgttgttgacgaatgacagattttcctgtctgataacgactagaataaagaataccttcatgactattttgtgatgaagtacgacataacatcagactaatatgattaagtccgaaaaaacgatgtatttctttagatacttcagaaatgaggccatccatgtctagatgcgctaatacagaatttgtaatatcgacaagtatacgatattgattccgctcactgcgaaggctctccatagtttcagcattgttactgcttaatttcatgacaccaccgattgccctaaaaaattaactatattgtaatcgctttattataaatttatatcaatgactgagtcatttttgatccaaaccgctattttcttatttaacgggaaagtaaaaaatataaatttaacaaatcgatatatatttatttatatattgattgattagatcgtcaaaaatgtcgaataaattgacgaaatataattttcctaattaataatcatttttatttgcaaattagttaattgaaaaataaggattagttaatttaaaaatagattggcatgaaccatgctatatctaatatatagatacctaattgttattctaaattagataattaattgcgtttatcgccaatataacggctatatataacaaacagcaggagaatatgatgaaccgtttcatcattgcagaccctaaaaagtgtattggttgccatacctgtgaagtagcatgtgttgtttcacatcagcaagcttcccaagataatttagcaatcgaccaaattagtgagcaaaatttccaaccacgcattcatgtggtgaaaggcttttcaattagtaccgcagttgtctgccatcaatgtgaagatgctccttgtgccaatgtctgtcctaatggtgccattattcataataaagattattactatgtcgatcaggataaatgcattggttgtaaaacctgtgtcttggcttgtccttatggcactatggaagtggtttctcgtccggttatgcgtaaattaaccgctctcaatacgattgaagcatttaaagctgaagccaataaatgtgatttatgtcatcaccgtgctgaaggtcctgcttgtgttgaggtctgcccaacgcaggcattagtctgtattgatagagatgcacttgaagatatggttaaagagcgtcgtcgtaaagcggcttttgaaacaggcgctgatttattgttctaagatcaagaataaagcaactatgtcctgatactatagttgctattatttatcctgcttcaagtaaggtatagacatgcatgaaatcacgctttgccagagcgcatttgagataattgactcacaagctaaattaaataatgcgcaaaaagtaaaaagcgtttggatggagatcagcgcactatcttgtgttgaagtctctgcacttgagttttgctttgatattgtttgtcgagatactatcgcacaaggttgccagctacatattgaggttatcccagctaaagcatggtgttgggattgccatcaagtggtgactgtttcgacttttaatgcaggttgtcctgcttgtggtagtcaaaatttgcgggttgagaatgacgatgcaatgcgcataaaacaaatagagatcgaataggggttgttatgtgccttggtattccaggtcaagttgttgaagtgggaaaaaccatcactgaaaatgcattggtcgatgtttgtggtgttaagcgtgaagtgaatatcgcattagtttgtgaaggcgagcctgatacgatgattggtaagtgggtattagtgcatgtgggttttgccatgagtatcgttaacgaacaagaagcacaagaaacccttaacgcattgatggcgatgggggaagtcgaagacgatgtgagtgcttttctctatggtgaggaaagtacagctaaacgtgcttgagcaaatttaatactatttgcatggttgctgactttttcttatactctattttcacttttcaaaggctgggacgacccagctttttaatctgtatattcaggggacgaccccaattatcaataggggtagtttatgtcttggataattctctttgtcgctggcctattagaaattgtgtgggcggttggtcttaaatacactcatggttttacccgtttaacaccaagtattattacgatcagtgcgatgatcgtgagtatggggatgttatcgtatgcgatgaaaggcttacctgcgggtacggcttacgccatttggaccggtattggtgccgttggtacggctatctttggtattatcgtttttggtgaatccgccaatatttatcgtttattgagtttagcgatgattgttttcggtattattggtttgaaattggcgagctaatttttatattcacgcagtttagcgataaaaaaagccactcaatgagtggctttaattttatttatcaagcgattatagtgtaaaaacaccaataattgcgataacactaataattgctgcagcaccataaaatacccaattactagcaggtacatgcactttaaaatcgtgcaacgtatggtgaatacggtgtaatgcacaccaaactggcagaataatcattagcagtaagaaaatacgaccaataaaaccttggctaaatgccatgatacgatcgtaagtaaatgcttctggcgcaatacccatcgggattagaataccgagcaggataataattgctggagagacaatcgcactccacataccacctgcaccaaataatccccagaaaataggttcatcagagcgcttaggaagttgattctgattcattatttcctcctgggttaaacaattagcgccactgccagaataacgacagtcacgacgatggttagaccccataaaccacgaacgataggctcttgtggtaatttttcatctttaacgacgatattaacggctttcggtgcaagcttaaaccaagtggccgtatggaataccgttgcgataagggtcacaatattaatcagcatcactattgggttacttaggaatccaacgaatcccgcccaactttctggtccatttttcagtgcaaatacaccgaacagtacaaccagactgaaccaaagttgtggtagacaagttccttcacgggtgatgtagaaacgatagaaaccgagtttcgtccaccagtttggctgcataccacgaacataaggcttacgttttgttgtcatgtcttgtttcctccttaacgtggtttcagcatggcaatgacaaagtcttgcgcactggctgctttaccctgctgaatagccgcagcaggatccacatgttttggacagacttcagagcagtagcccacgaaagtacaagaccagacgccattctcaccatttaattgaggcatacgctctttagccccatggtcacggctatcggtattgtaacgttgtgctaacgtaatcgctgcaggaccaataaactcaggatttaaaccaaactgaggacatgctgcatagcataaaccacagttgatacaaccagagaattggtggtatttcgccatttgagcaggagtctgtttatttggaccttctgaaggcttacgatcatttcctaaaatgtaaggtttaatcgcttctaagctttcaataaagtgagtcatatcgacgacaaggtcgcgctcgacagggaagttacctaacgcttcgattctcaccccatttgggtagtcacgcataaaggttttacaagccagttttgggactcggttaaccatcatgccgcaagagccacaaatcgccatacggcaagaccaacggtaagacagatctggcgctaagttatctttaatataacccaatgcatccaataatgaggtttgctcatcgtaaggcacatcataagtgacgaaatgaggcgcatcatccgtttcggggttatagcgcatgacttccatcttaacgtgcttcatgtcatcagccattcgctttctccttattctgcttgtcttgtgcagtcgcttcaccaccatagacacgtttagcaggagcagatttggtgatcttcacatcgctatattctaaacgcggtgcaccttctgggttatagaatgccagagtgtgtttaaggaagttcacgtcatcacgctcagtacaaccttcgtcaagacgttggtgtgcaccacgagactctttacgattgaatgcagaatgcgccatacattcagcgacatctaaaccaaagccaagctcaattttatacagtaaatcagtattaaagacgctactggtatctttaatttctacgtgtttaaaacgttcttttagttcagtcagtttatcaatggttttttgcattaattcaggtgtacgatagataccgcaaccttcttccatggcttcacccatttcatcgcggatctgagcccaattttcagaacctttttggttcatcagttttttcagattgtcttcgatgtcacgagtttgtgcatctaatgctgatgcgttagcaggggttgcttcttgggcacgacgaacggcttcttccccagcaagacgaccaaatactacaagttcagccagtgagttagaacctaaacggttagcgccatgtaagccgacagatgaacactcacccaccgcaaacagacctttaatacgtgtttctgtgcgctgattagtctcgataccacccatggtgtagtgtgcagttggacgaactggaataggttcattaactggatcaacacccacatacgcttttgccagttcacaaatgaatggtaaacgttcatgaagttttttcgcacccagatgacgtaaatcaagatgcacgacatcaccacggtgagttttaatggtacgacccgcgcgccactcatgccagaatgcttgagaaactttatcgcgaggacctaattccatatatttattttcgggtttacctaatggtgtttctggtcctaggccataatcttgtagataacggtaaccatctttattgaccagaatacccccttcaccacggcaaccttcggtcatcagaatacctgagcccggtaaaccagttgggtgatattgcacaaattccatatcacgcagtggcacgccatgacgtaaggctatccccataccatcacctgtaacgataccgccattagtattaaagcgataaacgcgacctgcgccacctgttgccataatgacagcattagcacgaatttgaactttcgtcccttccatcatattaatagcaacaacaccacgagcgtggccttcatcaacaaggatatcgagaacgaaatgttcatcgaaacgttgaatttgtgggtattttaaagaggtttggaacagggtgtgtaacatgtggaagccggttttatcggcggcgaaccaagtccgttcgattttcatcccaccaaaacgtcggacgttgactgacccgtcttctttacggctccaaggacagccccagagttctagttgagtcatctctgttggacaatgctcaacgaagtaatcaacgacatcctgctcacacaaccagtcaccgccagaaacggtatcattgaagtgaaagtcgtaggagtcgtgagcctgagtcactgctgctgatccgccttctgctgccacagtgtggctacgcatagggtaaacttttgagatcagagcaattttcagttgaggatttgcttccgctgcagcaattgctgctcgtaagcctgcgcccccggctccgattatcgctatatcggcattaaaggtttgcactgcgcttctccattgttcaagtgaaaattggaataattgtctagaattcaattcactgacattattaatttagtaatgctatttttttaagctatccgtaacgaaaatgtttcactgccttgtgactacgcttgataacatcgttattatcattgactgtaattttagtataacgaaatgtaaggtacggaaatttgatatgaatgatggttttcccgtatttcacaaaaaaagtgtgatctacaccaagaattctcggttttactaataattaaccagataaacttgagcataaaataaaatatttaattctaaaataaaaataaagttagcaatgaataattcgtttttaaagtatagataatttgaattacaaagaacaatggttttttgttattgactgatttttaaggtaaaataaattatctttaagctgttttaatataatttaataaaaatataaacaaatagttaaaataaacttttactatttatctaaaacaaatcgatttgtcttattaattgttaataaaatattaataaaatctcttaaagattataatagccatcaaacttaacggcgctaaatattaaatagtgcttaaaattgataaaaaatagacttattttatataagaaaaatatgagtttattgttgaactcggttgagaaagagaattattctaatttttatttttgatacaccgttgcgctattagtggcataaaaagttgttatcgttattggcttgggatagacgtgctattgctagtgacgaaaaaacgcaaaaaagtagatgatttgtagaattgtattgattgcatttatatgtttgtcgatatttaatcaatataattggtgggaatgaaaatatggtacatcttttctggaagaaatttgtctgttgaagaggatgcgagtaaactgcacgctttgttttctgttggagtttttcgttcatgagtgaaatcgcggattggcagccaagcgcctcaatcgccaacttactgaaaaaggcgaaaattgtcagtaatattaggcgttttttcgctgatcgtggtgttttagaagttgaaacaccgatgatgagtcaggctaccgttaccgatattcatctatgcccatttgaaacccaatttgtggggccaggtgcttctcaagggctaaagttatatttaatgaccagtcctgaataccatatgaagcgtctattagcggcaaacagtgggccaatttatcaaatggggcgttgcttccgtaacgaggaagccggtagatatcataatccggaatttacgatgcttgaatggtatcgaccttgttttgatatgtaccggttgatgaatgaagtcgatgatttattacaagaagtgcttgattgtgaagcgtctgaatcgctctcatatcaacaagcctttttgcgctatctcgatatcgaccctttatctgcagataaagaaaagttacgtgaggttgcggcaaagcttgatttatcaaatattgctgacacagaagaaaatagagatacgctactgcaattactttttgtgtcaggtgtagagcctcatattggtcttgaaaaaccaacctttatctatcattttcctgcttcacaagcttcccttgctgaaattagctcagaagatcatcgtgttgcagagcgatttgaggtctattttaaaggtgtcgagttagcaaatggttttcgtgaattaacggatgctaaagagcaacgtcttcgttttgaacgtgataatcgtcaacgtgttgccatgggattacctgaacagcctattgatgagcgttttttagctgcgcttgaagctggattacctgaatgttctggggttgctttaggcgttgatcgcctgattatgctcgcactcggtgttgagcgtattagtgatgtgattgccttccctgtttatagagcataatttatttgctaatcagattaaaaagagagtttaggctctcttttttaatatgaataatatggaaaaatacgaaaaattggtaaacgagcatttaaacgagcataaaattagcctaaaacacaatatactgtgataacaaacgagtaaagcgtatggataatcggagcgattttcactatgagacacggtgagagtagcagagcaactcaagggaaattatcctgccctttattgataagagcaggataacagaaataaaggttatttagcttgtttttgtaagaacttaacccctaaatcagggaaatcagtaaataccccttcggcacccgcttggttataaataatgtcataaagctgatcgccatctttggcatatttaggtagtttatccactcgtaccgtaaatggatgaatggttaacttgttggcatgagcatcggcagccataccggttaaggtgattttatctggtgttgagtcttcttctactaacatatgataatcagggccaatgccatcagcataagtcgcaatttctttcatggcgccaggtttaaacatccagtcataactgtagtttgtccatgtgccatctggttgtttttcatatgtctcattccaatcggtataagcgattaactgaaccagttttaaatccatccccatttgtggcatcaattctgttttaatgcgttttagatcgttaggatcaaaggattgtagataaacattatcgctcttttgggtatagccatactgttttaagacttcgagaacttttttagtaatgtctttcccttcttgttcatgaaaccaaggtgctttgatctcaggataaataccaatatcttgtcctgttgatttgtttaagccttggataaactcaatttcttcttggaaagtgtggatgcgaaaatcggattttcccattgggaaacgatttggataactttggacttttttaccgtcaacaatatcgaaaccttcggtaaatttcagtcctttgatctcatcaagagtaaaatcgatagcatagtaacggccatcttttcttgctctgtctggatagcgttcagcaacatcggtgacacgatcgagatagtgatcatgcaagacaaccagttggttatcttttgtcatcaccagatcttgttctagataatcggcaccttgtgcataggcgagtgctttggcaggtaaggtgtgttcaggtaaataaccgctggcaccacgatgggcaatcactactttatcgcttgctgcttgtgcgattgtacttaaagatagagttaaaagaacgcccgccactaacggtttcagtttgaaaggtgtactcataaagttgctccattttcattttcgtacaataaagctatgtacagttggcaataaaaaagccacatcagaaagttgatgtggcttgatttttagagatgagatttaatcaatttcataaataatcagttaatgattattcatacttctgtgacatttcacgtttgtgtttggtttcatttatcatcacgataagtaataacacaacagataatacactaccgccgatcatgaccataaagccaccgtcccaaccgaagtagtcaacggtataacctacgatagcacttgccgcaacagaaccccctaagtaaccgaatagaccggtgaagcctgctgcggtacccgcagcttttttcggcgctaattcaagggcgtgcagaccaattagcataacaggaccatagattaagaaaccaatgattaacatacatgccatatcaatattcgggttacctgctgggttcatccagaatacgatagtggcaatggttactaaggtcataaagaataccccagttgcaccacggttacctttgaacactttatctgacatccaaccacacagcagtgtgcctggaatacctgcgtattcatataagaagtatgcccatgaggatttatccatggcgaaatctttgacttcgcgaagataagttggagaccagtccaatacgccgtaacgaagtaagtaaacaaatacgttagcaattgcaatcatccacagaagtttgttagggaaaacatacttcataaagatttcttttgctgtcagttcttgttcgtctgtttctttataatcaggtggataatcgtttttatattcttcgataggaggtagaccacaagattgtggtgtatcgcgcattaatgcaaacgcaatcatcgcgactaaaatagccgcgaatgctggcatatataatgctgctttccagtcgttaaaccatgccatacctaacaggaacagcaatggcggtaaaccaccaccgacgttatgagcacagttccaaatagagacgataccgccacgctctttttgtgaccaccagtgaaccatggtacgtccacaaggaggccaacccataccttggaaccaaccacacaggaacaacagcacgaacatgatcataatgctcgaagttgcccatggcacaaagcccataattaacatcacaatggatgcaagaataagacctgcgggtaagaagtaacgcgggttagcacggtcagagaatgaccccatgataaacttagagaaaccgtaagcaatcgagatccctgataaagcaaaacccagatcccctttagagaatccctcttctacgaggtaaggcattgctaaagcgaagtttttccttactaaataataagcagcgtaaccaaagaaaatccccataaagatttgccaacgtaaacggcgatagacaggatctatctgttcctttggcagacgcgctttatgtggcgcaggtctaaacagacttaacatattagcctccgatggcttttattttaatatgttgatattaaacaatgacaaaacgaacaacaaagtaatcaaaaaattttctttaacgaacgtaatagtaaacttgttgaagcaaatttactgtgaagtaatactcagttgtcgaataatttttcaagatgtgtaattttgagtgatatgttaactttatgaaacactttctggtaaataatttgtgattagtatcacatatgtcgttttaatttttcactcatgagcgtttctctttcgtttttgctcattatcaaacattaaccacattttttgtgtatcttatacactataattaacgttaaagaataattaagcgtttgctgaatgtaatgtgagagggcatctctatgatgagcggttcaccagtgacagaaacagatgtcattattatcggcggtggagctacgggggcaggcatggcaagagactgtgctcgtcgtggattacgctgtatcctactggaaagacacgatatcgcaaccggtgcaaccggtcgaaaccatggtttattacatagtggcgcacgctatgcagtgaccgatccggaatcagcgcgtgagtgtatagaagaaaacatgatcttaaaacgggtcgctcgtcattgtgttgaaaaaacggatggcctttttattactctccctgaagattcgttagaattccaacaaacctttattcaatcttgccaagcggcaggtattgatgctcaagccatttcacctgaagaagctattcgcttagagccttcggtgaatcctaatcttattggtgcggttaaagtacctgatggtacggttgatcctttccgcttaacggcggccaatatgttagatgcacgtgaacatggtgcgcaagtactcacttatcatgaagtgatgggcttgatccgtgaaggcgaccgtgtgaaaggtgtacgtgtttatgatcatcaatctaaaaatatgtatgagatccgcgcacaaatagtggccaatgccggaggaatatggggacaaaaaattgcagaatatggtgatttaaaagtccgcatgttcccagcaaaaggggcattactgattttaggacaccgtatcaataatatggtgatcaaccgctgtcgtaagcctgcggatgccgatattttagtgcctggcgataccatctcattaataggaaccacctcaactcgcgttccttatgatgaaatcgacaatatgtatgttacccctgaagaggttgatatcctgatccgcgaaggttcgatgctggcacctaaactggctcaaacccgtattttacgtgcttatgccggtgtacgtcctttagtggccagcgacgatgatccttctggccgtaatgtaagccgcggtattgtattacttgaccacgcacaacgggatggactcgagggctttatcaccataaccggtggtaaattaatgacttaccgattaatggctgaatgggccacaaacaagatctgtgagaaattaaatatttcagcaaaatgtaccacggctgaagagccattgcctggctctcgccaatcggcagagcaagcattgcgtagtgtggtgtcgttaccggcgccaattcgaggctcagcggtttatcgtcatggcgatttagccaataaactattgagtaatgagcgtattgataaaagcttagtgtgtgaatgtgaagcggtcacggccggtgaagttcgttatgcagtgaattctttaaccgtgaataatttgcttgatttacgccgtcgtactcgtgtgggaatgggaacttgccaaggtgagttatgtgcttgtcgcgcagcaggattattaaatcgtttacaagtcacaacgcctcatggctccgaacaacaacttgcccattttctaaatgaacgttggaaaggtattcgtcctatcgcatggggtaatgcgttacgtgaaagtgagtttaccagttgggtgtaccaaggtttatgtggcttagatgccgatatgattgataaaacagcttcagtggaggccgatgatgaaatttgacgttatcattataggaagcggattagcgggactgactgcggggatccgccttgctgaagcgggcaaatcttgcgccattatcagtaatggacaaagtgcgttacatttttcatctggatcactggatttattaacgcatcttcctgatggcacgccagtttctcatccgaaacaagcgttatcaacactggcacaacaagcaccagagcacccatatagtcgtattggtgaagcaaatgtcactcaattgatagagcaagcgcaaacgctgttatcaacaacgagaaatttagactataaaggtaacggtgatgaaaaccattaccgtattaccccggttggacgttctcgcatgagttggatgagcccacagcgcgtgccgacttatagcgttaatcaaccattcccatggaaaaaaatagcggtggtggggattgagggattcttggattttcaacctcagtttgcaagtagtactttaaatgaacaaggtattgaggccattccttatcacattcatttacctttattggatagactacgtgataatccaagtgagtttagagcaattaatattgcgcgctatttagataagcctgaaaacacgcaagcattagcagaagaattaattaaacacatagataatagtgttgaggcgattgtactacctgcatgtatcgggctagatgaagaagcgccagttaatttattacaagagtgtgtgggtaaaccaatttgtctattaccgacattaccgccttcattattaggtattcgcctacatcaggcactaaaactgcgttttcaacaagcgggtggtttgatcatgccgggtgatcgcgcagaagaagccgatttagtcggtaataaggttgtcggtattcatacccgtaatcatactgatatccctatccgtagcgagcatgtcgtattagccacaggcagttttttcaataatggcttaattgcggaatttgatcgtatttacgagccattaatggaattagatttattagaaagtttaccgcgtaatgagtggacacaagtcaatgtgtttgccaaacagccttatatgcgatttggtgttaatacagatagtcaattaagaccgttaaaatatggtgaagcgttagacaatgtctatgcggtgggggcgcttttaggtggttttgatcctctaaacgaaggctgtggtgcaggtgtctccatgataagtgcactctatgcagctcaacaaatattacagagtgataaatcgcagcacaccacatctgcggctgtggaggcagtactatgagtttacaagataccagttttgaaagttgtattaaatgtacagtttgtacgacctattgtcctgtggcaaaggtcaatccactctatccaggacctaaacaagcaggccctgatggtgagcgtttacgcttaaaagatcccatgctttatgatgaagcactgaaatactgtactaactgtaaacgttgtgaagtggcatgtccttcagatgtaaaaataggggatatcatttcccgtgctaaacttaactacaatcctaaaacacctaaaattcgtgatgctattttaagtcatactgatttaatgggaacgctctctacgccaatggcgccgattgttaacactattaccggattaaaaccagtacgtaaaatcttggataaagcgcttaaaatcgaccatcgtcgtgaattacccaaatactcttttggtacatttagaacatggatgaaaaaacaggttgaagagcaagcacgctttaaagatcaggttgcgtttttccacggttgctatgctaactacaatcaccctcaattagggaaagatttagttaaagtattcaataaaatggatattggtgttcaactattaaaacgtgaaaaatgttgtggtgttgcattaattgccaacggctttgtgaaacaagcgaaaaaacaagctaccgtaaaccttgaatctctgacagaaaaaattgtggagaacaacattccggttgttgctacatcttctacttgtactttcactattcgtgatgaatatgaacatattctagatattgatacttcaaaagtacgggaaaatatagaattagcaacacgttatatttatcggttattggaagaagggcgtgaattaccattaaaacataccccattaaaagtggtttatcataccccttgccatatggaaaaaatggggtgggcggcttactccattgatttaatcaaacgtattcctggggtagaagtgattgtattagattcacaatgttgtggtattgccggtacttatggttttaaatcggaaaactacgatgttgcgcaaggcattggggcgggattattccgtcaaattgaagagagtggttgtgatttagtcattacagattgcgaaacctgtaaatggcaaatagaaatgtcaacaaccaaaaaatgtgaacacccaattagcttattagctcgggcattgtagaaaaaattaatgagataacaataacgtagtcactgattacaataacaagcaatttgggaataaaagtcgatcttttattcccttttttattactttacatcacattgtgagtcaacagggtacagagcaccctgttggcgccattaatattaatctttaatataaccactcacgccctaattggtctgctgccataatcgccgcaaacactttatcggaatcaacatcaaatggcatattgtaaattgtttcaccttctgcacagcttaattctgcgacagccatgattttttcatttaattcatcacctgtagcatgtacgcctaattcttctaaggtaacaggtaagccaacttgaacacagaaatcgagtacttcttcgatctcttctaacgggctattttctagcactagttgaactagagtaccaaaggcgactttttcaccgtgatacattgcatggcactcttctaatgcagtgaaaccattatgtattgcatgtgcggcggctaatccggcactttcaaaaccaataccgcttaaaaaggtatttgcttcgataatattttcaaccgcagtagtacacacactacggctgacagccagtttggctttatagccatcttcaagtagggtgtgataacaaagctctgctaatgccagtgctgcaagggtggttttacctccagccattgtttgcttttgtgctcgactacaggctcttgcttcaaaataggtcgctaaggcatctcccatccctgccactaataaacgtggtggtgctgaggcaattacattggtatccataacaacgatatcaggatttttcgggtagaaaagatagctatcaaatgcgcctaattctgtataaataacagaaagtgcgctagtaggagcatcggttgatgcgatagtcggagagatcaccacaggtaactggcatttataggcgacggctttggcggtatcaagggtttttcctcccccaacaccaatgataacaagagcggcttgttgtttggctatctcaactaagcggtcaatctctttatgtgtacattcaccgtgaaactgttcaaagtgtccattgacttcatactgtgtcatgctgtctttgacgatgctgccagccagatccatgacaaacttatcagcgataatcaatgctctctcacccaaaggttttgtatatttcccaatatgatataacgcatcaggcccttggatatacttcgctggggattgaataacttttaacataatagactcctactatcttcaaaagagtaaaaaatctttatggcggggaatatcatcttaaccgagatggaaaaaagctgagatgatccagaatactattaatagtttaattgataataaaaatattatattgaaacgggttaatttttgtattgctaggcaataaaagtcttactctttatcattcatcaatagtagtgcggtgtcttcacttattatgctaaataatggtatttattgccggtagatcaaggtattggtaaaagtaagctaaggctttattgtgcaaagaataaagccttattgggggagtcaatcagctaaggacggatttgagcatagctttgttgttgattttcttgtgcaaaaaaatagcgcaaaataaagttcaataatacgccataggccggtaagaaaaacagcatacaaatcgtcaatttaaaagtgtaatccacgagcgctatttcgacccaattggccgccataaacgcatctgtactgcgataaaaggcaataaaaaagaaggcaacagtatctaagaaattaccaaaaaacatcgctgcacttggtgctacccaccatttttgttgctgtcttaaacgattaaagacagaaacatccataatttgccctaacacatacgccataaagcttgctgtcgctattcttgccaccatgatattaaaatcattgagtgaggcaaaaccttgccaacttccttggaaaaagagtgttgatattaggtaggaaatagctaatgccggtatcataacggcagtaataatgcgtcttgccagaggggctccatagatacgaacagttaaatctgtcgctaagaaaataaatggaaaagtaaatgcaccccatgtggtatggaagccaaaaatagaaataggcaattgaacaagatagttactagaagtgattatcaatatatgaaataacgaaagccataatagcgccgccgctttttggcgggaggtaaacctatacataaattgtacctttttagtgattggggtgagggaacccaataaaacgtatgattttctctcatcaggagaggatgcgcatcatactcttgttgcgcaacaaaagcaaagatcggcgataactcaacgtgaagttgatgaatgtgccgtgatgtgcgaggcaaagcgagatataatagtgctatctgttagtgcgaaaaaatggttaatacaatgaatgcccaatttgatgatgcgacaaaaacattagataccttaggactacgttgtcctgagcctgttatgttagtgcgtaaaaccataagaaatatggctcagggggaaacactgttggtgattgctgatgatccggctacagtgcgtgatattcccggtttttgtcgttttatggaacatgacctattacagcaagagacgcaagcaacaccttatcgttatttgatccgcaaaaaagagggtcagctgtaaatcagcttatcttgtaaaaaacacgcttatcaagcgagataaagcatggcttgtctcgcttgtggctctttctttcaaggcaaaagtagctctccttgcctttttatacctcatataaaatctatttacctcatgaataaatgcaatggttttatgatgaattagtcatgttttttctaagagattatttttctatatttataggtttatgtgaattaatagatttattgtattagtttcgtataagaaacaattaaaataattttatttatctcttttgtattattgtgaaaatagtatttaaaaatgtttgtttattcatcgttttaatgatgaagggataattattagttaattttttgctctttttgtttttcctaaaaatgctattttagtgttttttataatagagtttattttatttaatttgttttgtttcaataagatatattttcatttatttaaaatgccacatattgataaattataatcttgttaaaatatcttgaaaagttcattattcacagcgtattaataaatacaaaaacctctaataaataaggatctcaactgtatgtgttattaatctaatatttagactatttattttaatagccataaatagatgacgttcttaattaattcgttgtaccggaaaccattcgcatagggagtacggtattttttttatcagcacaattccactaactatgaaaaaaacaaaacatttatttaaaacaaagggttgtaatattccttttacttctgtgatgatggtaagttttgtcttaatgggctgtaacgatcaatcgactcagccaaccaagcctgctatcccagaagtgggagtctatactgtcaaagaggaaattcttccattaacggtcgatttgccagcaagaacggcatcttatcgtgtctcacaggtgcgcccacaagtcgatggtattttagaaaaacgtctatttactgaaggtagtgatgttaaaaaagatcaaccactgtatcaaatagataaaaaaccttacgaaactcaggtagctaaagcgcaagcggcttacgataatgtgaaaaaattagctgcccgttataaatctttacgtgccactaatgccattagtcagcaagaatatgacgatgtagtatcacgccttgatcaagctaaagccgatttaaatcaagcaaagattaaccttggctatacccaagttttatcacctattagtggcaaaatcagtcgctcttttgttagtgaaggggcattagtgagtagtggacaaagccagccattagcgaccatcacacagcttgatcctatctatgtggatattactcaacctattactaaccaactgaaattaaagtcactgatccaacaaggtgtcgtcactgatagtgaagataaaatggatgtgacgctgtttttagaagatggctctcagtacccttataccggtacattaagtttttccgaagtccaagttgagccaagtacaggctcagtgacattacgcgccaaattccctaatccacagcaccaattattaccaggaatgtataccaaagctcgcattatgcaaggaactcaagagaaagcgattgttgtgccacaacaagcgattacctttgatgcccgtggtaaatccatcacatatatcgttgatcaacaacaagtattacaagcaagagatgttgaaatattaaaaccacaaggtaatggatggatcataaaacagggattacaagctggcgataggatcatgacagaaggtcatcatcgtgcaaaaccgggcgtaaaagtcaatgcggttcctgctaacaacatttcattaaagaccaccttagagtaagtcttcatttaggtaatacattattatgtctcgattttttattaatcggccaatactttcgtgggtgatggctattgttattatgattgcaggaggattgtcgttaataaaacttcctgtgagtcaatatcctgaaattgcagctccagcgataatgatcaccgcagtttatcccggtgcatcggctgaaacagtgcaagacacggttgttcaagttattgagcaagagcttagcggattagatggcttccgttatttaagttcaaatagtaatacggatggtagctttgaagttatcgccacttttgaacaaggtacggatagtgatattgcgttgatgcaggtacaaaataaactgcaattagcaactcctaagttaccccttgaagtacaacgacaagggatgagggtagtgaaattccagattaactttatgcaagtggttgcccttgtagatgaatctggaaaattagatgcctttgatttaggtaattaccttgcctcacatatgaaagatcctatttctcgtattgatggtatgggggatattctgttattgggatcaccacgcgctatgcgtatttggcttgatccggataaactgactaattatcacctgatgccgcaagatattgccgcggctatccaagatgagaatgtacaggtgtctgccgggcagttagcgggcttaccggcattaaaaggtgttgagttaaacgcaaccattaccagtgcatcacgtatggtatcagtagatgaattcaaccatattctattaaaagtgaatcttgatggctcacaagttctgttacaagatgtagcgaaagtcgaagtaggggcagataatttctctatttcaagcttatacaatggtaaaccgtctgcgggtatggctatgcgcttagcgcccggagctaacctacttgatgtgtctaaaaaagtaaaagaggttgtggaagctcagtcgcagtttttccctcaaggtgtaaaagcccttttcccttatgacacaacgccttctgtaaaatcgtccattagctctgtggtaagaacgattgtcgaagcttccatcttagtgttcttggttatgttcctgttcctacaaaatattcgggcaaccttggtgccaacattggctataccggttgttttattaggaacttttggtgtattagccgcattaggtttaactatcaacgtattaacgatgtatgccatggtgctcgcaatcggcttgctggtggatgatgccatcgttgtggttgaaaacgttgaacggatcatgcatgaacaggcgatttcggtaaaagaagcgaccattctctcgatgacgcaaattcaaggggcgttagtggggattggtcttgttttatcagcagtctttgtgccaatggcattttttggtggatcggctgggattatttatcgccagtttgcagcgactattgttgtcgcgatggcattatcagtgcttatcgcattaacatttacacccgcattatgcgcgtccatattgaaaaagccacaacctaaggtgaagaaacgtcgtggattcttctggctgttcaaccgtttctttgatagaggaactaactattacgagaagggggtacgcaatatcttgtaccgtcgaggccgttatatgtttattttcctcattattaccgttggaacagggtggttatttacgcaattacctaaagccttcttaccaaatgaagaccaaggggttgtgatgattgaagtccgtatgccagcaaatagtaccgctgagcgtatggaacaaaccatggcagaatttagggattatttactgaccgaagaaaaacatctggttaaaacagtatttactgttaatggctttaactttgcaggtcgtggtcaaaatgcgggtatggcatttgttaacttggctgattggtcagagcgtaaaggaaaaggagaagatgttttctcattagtggcacgagcacagcaacactttaactctatccgtgatggtatggttattgcgttcccaccacctgctattatggagatggggaatgcgatgggatttgatttctacttacaagataatgcgggtttaggccatactgaattggttaaagctcgtgataaattcctcgaattagcagcacaaagtccagtattaactaatgttcgcccgaacggtaaaaacgatgaacctcaattacgtgttgtgattgataaagagcgtgcaagagcattacaactgcgtttatctgatattaacgatacattatctgccgcatggggatcgatgtatgtaaatgattttattgatgaaggtcgtgttaaacgtgtttatctacaaggggaagcctcagcgcgtatgttgccaaccgatctggataaatggcatgttcgtaatcagcgcggtgaaatgatcccattcaacgcctttgcaacaacacaatggtatatggggccaccgaaattagagcgttttaatgggctatcagcgattgagatcttaggtgaaccagcgccaggttacagtacgggtgacgcgatgctggcaattgcagatattatgaaacaattgccatctgaaatcagcctaagctatagcggtctgtcttatgaagaaattcaaacacaagaccaagcacctgcattatatgtgatgacaattctgtttgttttcttaagcttagcggcactctatgaaagttggtcagtacctttctctgtcgctttagtggtgccatttggtattttaggggctgttatcgcgacactgttacgaggtttatcctcagatgtctatttccaaataggtttgatgaccaccattggcctatcagcgaaaaatgccatcttaattgttgagtttgctaaacatctttatgagaaggatggtaaaccattaatcgatgcggcagcagaagcggcaagaatgagactacgccctatcattatgacctcactcgcctttacttttggggtattacctatggcacttgctgcaggtgcagggcaaggtagtcagcactctgttgcaacaggggtaattggcggtatgctcgcatccactttcttggctattttctttgtaccactgttctatgtctttgtggttaaactattttcacgaaaaaaagcacatgtgagtattgaggaaatagataagtaatagaattatctcgcagtgagatttaagcgtaaaaataacccaaaccatagcaatgactgtggtttgggttttatttttaggttagtttaatcttggtgaggagattttagtttaacttttaatagtcttacggcattggcggtcactaaagctgttgctcctgagtcagccaatacggcaacccaaagtccagtgataccgaataaactggtgactaagaatatcgcttttaaacccaatgctatggtaatgttttcacgtataattttacgtgttgcacgagatagctgaataatttcgggtaagccagttaaacgattatgggttaatgctgcgtcggcagtttctaaggcgacatctgtaccacttcccatcgcaacaccaatggtagccgctttcattgctggtgcatcattaataccatcacccaccatcattgtgttatgtgtttgactgatttccatcactgaggtgactttatcttcagggagcaatcctgcacggaaatccatacccagtttttgtgcaatcgcagccgctgctcttgggttatcaccggttaacatcacggcattgatattcatcgatttcaacactttcattgattcgatagcatcgttgcgcaatgtatcttgcatcgcaatcacaccaatgaactgatcttcttttaataccacgacaacggttttgccttcatcttcaagacgagcgacttgttgttgccattgtgcagataatggtgtggtttctgataattgtgttggggcactgaccagaatatgctgattatttaaataaccttcaatccctttacccgctaaagccttgcgattatcggcttccacaacatcaatttgttgctcttgtgctttattaataatggcttttgcgagagggtgatgagagccaacttctacagaagaagccaacatcagtagctctttctcattaaagcctacatttgctatgacatcagtgacttgaggtttaccctctgttaatgtgcctgttttatctagagcaacggtattgactgtgcccagttgttcaagtgctgcaccacctttaattaaggcacctcgttttgttgctgctgccagtgctgatgtaatggcggctggtgttgaaataaccagagcacaaggacaaccaattaataacagtgttaaaccacggtagaaccaagtttcccaaggttgagcgaataacaaaggtggaataatgatcactaatgcggaaaacagcataatcagtggtgtgtaatagcgactgaaacggtcaacaaaacgttcaatgggcgctttacgctcttccgcttcttcgatcagttgtaaaatacggtcgatggcattttgcccctgttcagagaccactttcatttgcaccgagcgatcaacagataaacagccagcagcgactttttcaccttgtaaacgttcgaccggcaccgattcacccgttaatgcgctttcatcaaaacttgcaaaagcagtaattaattcggcatctgtgggtaagcgcgcacctggtgcaatttcaataatatcgccggggcgcaattgagctacagggactgtctgttttttaccctcttttattactaccgcttcttcaggtacaagagccattaatgcgctgactccgcggcgtgcacgacccgcagcataagactcaagcatttcgccaatcataaacagcaaaattaccattgccgcttcttcggtggcattaataaacagtgccccaatagccgcaacactcatcaaggtttcaatcgcgaatggggtaccactacgaatgagtcgtagtgatttttttacaatagggaataacccgattaatgtcgttgcaataaaggcagcgcgacctgcttgtggatcaataaactcggcaccccaacttatcgccattaaaatcgctaagataatgacgaatgagctctcttttaagaggctttgttttgcaggaggctgagatcccgctgatgagatatcaaatagttcaaaaccggcacttttaacggcactaatcacatcagtacgtaaatcggtatcggcatcgacaaccagtttttcagtggcaaacaagatcttcgcttgtttaacgccgaccactttcagtactgctgtctctatcttttgcgcgcagcttgggcaatccattccttgcactttccaactaaaacgttgctgtgcaattttttcaggctctacattagagacaggggcgttgctgtcacaacagccatgggcatgatcatgttcttcttcacattcgggatcactcttatcgattttgctatgagtgtgtccactttcagtatgtgagtgcatactactattatctgcctgattagagcagcattgagagcttgaacagcaagcatcggtatgtttatggttatcgtgttgatgagcgtgtttagacatacgcctctcctcgttcaacaaagtacagttttatcaattaccgatactttacagcttggagtagagtccagagtcaagataaacagagcgtattgattgtcaaaaagtgcggatttgttaaatcaattaatcccttgtttctattgataaagaaacaagggatcagggttttacagaaaaagggctctaacaataaagaagtgaccaataaagtaacaggcacttaccagtcctttagaggctgaaaaagagaagcggaaacggttgataagccaaatagagtaagcaattactaacaagagtgagcctatcatgatagaaaagttgtagtcgttgctcaggtagaagaatttctctcctgcaacccaaaacatcgcaaaagccgctaataaagtcagtaatacaggaatggcaaatttatccagtttagtccagatgatggctaacacgataattgcggcaacgataacaaaaccaagcaaaggaagataaaaagagatttgtaatggtaaggcaaaactaattaggtagagaatataacttaggaataacaaggctaaagaaggtagtaaatacttaccttcaaacatttttaatacatcagaaagtaatgttgctaataaagcgccgacaataagataactattaatgctatgctcagggacttgccatgcccaaaggagtaatagtagtagtgtaatagggcggaatagccatcgttgccaattagggccacgatacgcggcatcgatataaagccacccagaaaataagacagcgagaaaaggccaactcataatatcttccttattcttatatagagaactcttttattattcataacagaaagcataatttaagaatagcgattaatgaagaaactggcgtattaattaaaattaactacagataagcacaatgtgaatttataacgataataggaatgagtgtaatgaataaagcgggaatgttaggtatcgcggtgctgattatcattatcgctagcgcaacatatcgtttttttgagcaaagaaaacagcgtatcagtgatgataatgcacccgttaaattatatatggtagaagttgttgataagcaacaaataccgaaaaacgatcgacgttcaagagaaaatgatattaatgggccagaaacaacctattactatcaagtgacttttcgtttaacaacggactctcagcaagatattatcttacgtgtggataaaaccactttctcaaatgtagcgctggagatgaaagggcgattatttatgcaaggtagtcgtttcgtgcagtttgaaaccgatgcaccagataatgagagtagtaaaacatcagctcaataagcgtcagagcataagaaactggggagttagcgtgttatccccagtgacttgaatagacgatgattattggtttttatttttttgtttttctagatactctttgcgcaactctttttgtattctcaatagctcaaaaataccaaaaaagaagatcttaaattggagtaagccagaaggttttttatcttcgggttggcctgctttatacatggcaatttgtaagccgtgcataatcaccataaagattaatgcgatatccataaagtactttaaaggtttagggaatggggaaataagatttaaacaaagaaatccccacacaccgatcattaaaaatcgacctaaaaagattaacatagcagctccataacaaattaagcagataaattgcgaatatagagacgataggcgacttggcctgcgattttttctctatgtaatcgccaattttctggtaaagaataaacctgtgcgtttacttcttcttcaatataaatataacaaccttcggctaaccattggttattttctaataattgcagggtgtttgccaacataccttgatgaaaaggaggatctaaaaacaccacatcatatgccgtaccttgtttagctagataatttaacgcactatcttgaataacatgcccattatcagcgccaagcagcgctaaattagcagtaatttgttgcgcgactttacggtcgaactcaatgaatgtcgtttcttttgcatagcgagagagtgcttcaatacctagcccaccactgccggcaaagcaatctaagcaacgagcgtcctgaataacgggcataagccaattaaacagtgtttctttgactctatcggtggtgggacgtaatccttggctatcaagcacaggaagtttccgaccacgccatttacctccgattattctgatttgtcccatcggcgttttttgtggtttcttagccatatttttctgatatatatcgtttaagcgtgaattttggcgtgttttaatgtttcaaggaacaagtttgttgataacttgataacttaccttgatttaagcgcgaataatttaccataaaattcgtataaaagatgcgtttatcctcgatcaaatgatagacttcattattatttttaatatcgtcaatgttatcgcgccatgatttagtgcgaggagtttagtagctaatggcaaaagaaaaaaaaggttttttctcgtggctcggatttggccgtaataaagaagaaaatactgcacaagagaaagaacaacaacgtttagaggccgaacgtgcagagcaggcgcgcttagccgaagaagaagctcaacgtcaagcgcaactagaagctgaacaagtgcgtttagccgaagaagaagcccagcgtcaagcgcaacttgaagctgaacaagcacgccaagaagcgcaaagagcagaggcagaacgattagctgctgaacgtgcagagcaggcgcgtttagccgaagaagaagcgcaacgtcaagcgcaacttgaagctgaacaagcacgccaagaagcgcaaagagcagaagctgaacgattagctgctgaacgtgcggagcaggcacgtttagccgaagaagaagcccaacgtcaagcgcagcaagaagctgaacaagcacgccaagaagcgcaaagagcagaggcagaacgattagctgctgaacgtgcagagcaggcgcgtttagctgaagaagaagcccagcgtcaagcgcaacttgaagctgaacaagcacgccaagaagcgcaaagagcagaagctgaaaaattagctgctgaacgtgcagagcaagcgcgtttagccgaagaagaagctcaacgtcaagcgcaacttgaagctgaacaagcacgccaagaagcgcaaagagcagaggcagaacgattagctgctgaacgtgcagagcagactcgtttagccgaagaagaagcccaacgtcaagcgcaacttgaagctgaacaagcacgccaagaagctgaagctgaagaaaaagcgcgtattgcacaagcacaagccgaagcggaagatattgtcgcgttacgcgaagaggtattagtcgataaacccgtagagcaagagagaccgaaaaaagaaggctttttctctcgcttgaaaaagggattattaaaaacacgacaaaatttaggctccggttttatggggctattccgcggtaagaaaattgatgacgagcttttcgaagagttagaagagcagttgttaattgccgatgtgggaatggataccactagcaagatcattaacagtttgactcagcatgctagtcgtaaagatctcaaagatgctgaatctctttatggtaagttgcgtgaagagatgggcgatattttaaataaagtggataaaccattaaatattgaaggtaaaaaaccttttgtcattttaatggtcggagttaatggggtcggtaaaacgaccactatcggtaagttagcccgccaataccaagctgaaggtaaatcggtgatgttagctgcgggagataccttccgtgcagcggcggttgagcaattacaagtttggggtgagcgtaatcatatccctgttattgctcagcatacgggggctgatccagcatcggttatttttgatgctattcaatcggcgcaagcaaaaggtgtcgatgttctgattgcggataccgcgggacgattgcaaaataaatctcatttaatggaagagctgaaaaaaatcgtccgtgtaatgaaaaaattagacgaggaagcaccacatgaagtgatgctgacactcgatgccagtacagggcaaaatgctgttagccaagcaaaattgtttaatgaaacggttgggctgacaggattaaccttgacgaaactggatggtactgcaaaagggggcgttatcttctctatcgctgatcagtttggtattcctattcgctatatcggcgtcggtgaaggtattgaagatttacgtccgtttaaggccgacgattttattgaggctctgtttgcccgcgaggagtagttgtaatgatccgcttcgaacacgtcagcaaggcttatttaggtggaagacaagcattacagggggttgattttcatcttcgccctggtgagatggcttttttaaccggacattctggtgctggtaaaagtacattgcttaaattaatttgtggcatagaacgtccaagtgatggcgctatttggtttgctggtcatgatatcagtaggctaaaaaatagtgagatcccttttttgcgtcgtcaaatagggatgatcttccaagatcaccatttgctgatggacagaacggtttatgacaatgtctctctacctttgattattgcaggcgcaagtgaagaggatattcgacgccgagtttcagccgccttggataaagtcggactacttgataaagcgaaaaattaccctatccagctttcagggggggaacagcaacgagtgggaatagctcgtgctgttgtgaataaacccacggtgttattggctgatgagccaacagggaatcttgatggtgaactttcagaaggcattatgcgtctgtttgaagagtttaatcgcgtgggggttaccgtgttaatggcaacgcatgatatgacacttgtagagcgcaggaattaccgtattctaaccttaggtcaagggcgtatggtgggaggacaaaatggctaaaggaaaacactcccgtaaggcaatgccaacaccaaaagcgaaaacaaaagcattacgtggtggacgccgtgagcagtggcgttatgcatggcgtaataccatggccgactttttacgccaacccctctcttctttcttaacggtgatggtagtagcgatttcattaacactacctagtatctgttacattgtctggaaaaatgtatcaacagccgcagagcagtggtatcccgctccgcaactgacggtctatcttgataaatctctagatgacagcttagcgcaggcaacgataaaaaatatcgaggcattagataaagtcgaagaggttaattatctttctcgtcaagattcattagtggagtttcgctcatggtctggatttagtagcgcattagatatgctagaagaaaatccattacccgctgtcgcgattgtgactcctgttatggatcctaatgacgagcaattaatggttaatttgcgtgatgcagtggcaaatattgccggtgttgacgaagtgagaatggacgatagctggtttactcggttatctactttaacctcattagttggacaaatcgcaatggtgatcggtagcttaatgattgtggcactgctattggttattggtaatagtgttcgtcttaatattttcagtcgtcgtgataccattaatgtgatgaaattaattggtgctactgatggctttatcatgcgtccctttttaaattggggtttagtactcggctttatcggggctatttttgcgattattttctctgcattattggtatggaagttatctgatgtcgttacgcaagcggcgaccgtatttggaacaactttctcaatatctggattaggttttgatgaatcggttattttgatcctcgtttcgatgaccattggctggtttgctgcttggttgaccaccatgcaacatttacgtcaattcacaccagaatagccatattagtccctttttccctttttattatggcgggttgcattattatggcaaccttgccattttatcaaacccctatctttggcataataatgttctacacttaacctagatgaattgagtactatttttaatagatgaatttgcggtttgcttggtaaagtacaaagatatgtaaacatagatgcgatatgaacctttagtctttatgctggtcaataatgttgtaaaaacataatatctaccaccaacgatgacctgttaagtactattagaaggttcttcctgctcaccatacagtattaatattaattatctatttgattttcatgaggatttgaatgacaaaagaaatgcaatccttagcattggttccgcaaggcagcattgaagcgtatatccgtgcagccaattcctatccgatgttaacggcagaggaagaaaaggaactggctgaacggctgcattacgagggcgatttggaagcagcgaaaacgctgatcctttctcatttacgcttcgttattcatgttgctcgcagttattcaggatatggtttacctcaggcggatcttatccaagaaggtaatattggtttgatgaaagcggtgcgtcgctttaaccctgaagttggggttagactggtttctttcgccgtgcattggatcaaagccgaaattcatgaatatgtgttacgtaattggcgtatcgtgaaagtcgcgacaacgaaatcacagcgtaaactgttctttaatttaagaaaaaacaaaaaacgcttagggtggtttaaccaagatgaagtcgagctagttgcgaaagagcttggggtttctgagagcgatgtgcgtgaaatggaatctcgcatgtcggcacaagatatggcatttgacatgagtgctgatgatagtgatgactcacatcctgtagctccggtgctattcttagaagataaatcttctgactttgctgatggtattgaagaagataactgggataaccatgcagctgaccgactgactttagcgataaaaacactggatgaacgtagccaagacattatccgcgctcgctggttagaagatgataataaatcaactttacaggagcttgcagataaatatggtgtttctgctgagcgagttcgccagttagaaaaaaatgcgatgaaaaaattgcgtttagcgattgaagattaatcacattttaaagccaatccaacctctctgattgtagagtatgatataaaagcgatattgatatatcgctttttttatacgcggagaacatgacgtgaaagagataaaaatagttatcgccccagatccttttaaagagagcttaagtgccaaagaggtggcagaggcgattaaacaaggcttttcacgttatttacctgatgctgattattgttgtattcctatggccgacggcggtgaaggtacagtaacgtcattagttgatgctacccatggtcgttttatcacaacgccagtttgtgatccattaggtaaacaggtaacagccacttggggagtgttaggcgataatactactgccgtgattgaaatggcacaggcatcaggtcttcatcttatcccttcatctcaacgcaatcccaatttaacgacgagttatggtaccggcgagttaatttgtgccgcactagatttgggggttaaaaagatcattttaggcttaggaggaagtgccacaaatgacggcggtgcaggtatgatgcaagcgctcggtcttggtcttaaagataagtctggaacatctttgccttttggtggacatgcattaagtcaacttcattctatagatatcaatcaactacatccaaaacttgcctctgttgatatagagatcgcctgtgatgtaactaatccattatgtggcgaattgggggcttcaaaagtctttggcccgcaaaaaggggcgacagaacaagatattgcgcaactggatagcgcactacaccattttggtacttatcttgagaaaatgacacaacgcactcttatcaatattgcaggaagtggtgcagcaggaggattggctctgcctttgctggcatttacgcaagcaacactttcatcaggtattgatttggttgctaacgctgttgaattagaaaaacagttaatcgatgcagatttggtcataactggcgaagggcgaatggacagccaatcagcgcaaggtaaaaccccgataggtgttgctaaattagctaaaaaataccatcgcccagtgattgcgttagttggtggttatttaccggattatgatgtggttcatcagcagggtattgatgcggttttctctatcatgcctggtgttgccactttacaacaagcctttgataatgctaagcaaaacttacaggaaaccgcttataatatagcgaggctttatgctttatcattgcataaataatcataagtatcagcctgtaatgaagtagtaaaatgatgatgcgctaaaaaagcctgtgctacaggatcgttgatttgccctgttttcaataaagcttgccaatgtgtaatggttggatttttttcaaggcattgtgttagtaagtaatgcccaacaccacgacgacgagtcacttctcttaccataaaatcactgataagcgctgtttttgcttggtattttatacgacaagccgctagtaatcgcccgttaaaacgggcgacaaaaagagcatgctctgtggtgattggtgcagtgagtgccatttggtactcactatcttgccaaattttccctaaatctattttatcttgtgctgaaagctgcggcagtttttcaatggttagtttcatcaaatgtcctgttagtcgatggtttgtcgttgctgttttaatgtggaaagtagcgttttgatggcaaaacacaatgccaaacttgttaagatcacacaagaataaaagacatattgataatgattatcggtgacaaaatagcttgcgaccataggccctgcagccataccacagtagcggataaaattataaatacccattgccgttgctcttactgaactaaagtggctggttattaaggtcgtgtgtgtaggcatagttaatcctaaagagagaccatataacaccgttaatattaacattattggtaatgagatttgccaaaatagggcaaataacgacaacatggcaaggtttatacatgaagttatgatcacaccatattcagcgctaaacaaatgacaaaccttacggtaaaggtaactgcctaacaccagtgcaatggacataggaacataaagcccaccaatttcactgctatttaagtgataaaggtgaaaagcaattaaaggtaaaaatactaataggcagaagtagttataaaacaccataaaacttatcacaaaaacagatttaccctctggggcggcgagcacttgtcgcatagcagataagcttttaacggactgtttttgttctgggcgagtttcaggtaaataaaatagatgggcaatcagcaaaacaagtcccaccatacttaagaaaacaaaaatactttggtagtgataatgttgtgctaaatagccgcctaataaaggaccactcgctggtgctaatgctagcaacatttggtaacttcccattgctttagcacgctcattcccttgatagagatcgcctaaaatagttgctgcgacaacagggatggcagcgatacctatggcttggatcactcgtccaaaaattaataggttaatagaattagcccatatacaaataagtgcgccgataattgaaatcgttaacccactgagcaaaataggttttctgccccatttgtcaatcaatgaaccataacataactgcataacagccatagcaaaagtgaaagctgataccgtaaggttaaccagtgataatgtggtattaaattgctgctggatcaatggcagcacaggagtataaatattttgtgctagagagcctaataaagcgctaaagcaaacaaggtaaaacagactacggattgataatttcattatattgcctcttagttttgtttccatggaaacaaaatagataatagcgatattttgattgatgtaaatagttttggtattattttttaaaatattttttccaaggaaacaaaatgacaaaacagcaagtaaccacacaggaattgcttaatggtttaagtgaattgttgcacttaaaagaagcgaataatgatgaaggtcataagaaagtattagcagagaaggggttagaaaattattcactcacagagcttcatgtgatccattgtattggtgaagagagtatgcgtaacctcacaacgatcagtgattatatggcaatgacacgtggggccgtctcaaaaatttgtcgtcgcttacagagtaaaggcgctattgagaaaataaaattagcggataaccaaaaagagatattttttattttaactactgaaggggaaaagctgtttcacactcatgaattgttacatcaacaatctcaggcaaaatggataaccttatttgaacagtatgatcaaaatgaaaggcgggcaattaaacgctttttagctgatgttgcaaatcgttttcgccacaagaaaaaagcataaagaaaacccccatatggttaaatataggggcgataaagtttattttttatcttcggcaatgcggttacgaatattgtcagcacgctcttttgatggtgggtgagaatcaaacatgcttgaatcactaccacctaatttagctaatttttcaaagccagtcactaagcctgaagtattgacaccgcgttttttcagcagatcgtaagagaagttatcagcttgtgtttcttggtgttgagagaactgggcattaaccagtttttcacccatttctgctaactgggaactacttaattgtgctgctactccccccgctgaagaggctgcggtacgtgccgcaacggtggcatgtgctacttggattgctttacgtgtatggcctaatgctacatgtcccatttcatgacccaatacaccttccacttcgttgtcagtcatgatgtccattaaaccgctataaacacgcacacagccgtttgccatcgcccatgcattgacatctttagtgagataaactttatagtttactggagtaccattaacttcattacctaacgctttcgcgatattatttaagcgtttagtgtagttactatttgcaggtgcaattttgtttttagcatccatttctttacatgcatcattagttagcgctttgacatcgtcatcacttaatgttgccgcttggaaaagttgtgtacctgattgcgctaacatagaagtatcaagatttttacagccagagagtaatgccgcggataccatcactgtcgcaagtagttttattttcattatcaattaagtccttttctgcttagcagtttaatattattagttgcacattaaatgcgagcaaaagaatagcagtgcttatctagtggtgcaatatgcggatattccaattatattattctactgctataaaaaattatttttattattttaaacgcgtatttttctattttttaaacttattatataaaatattaaaatccttaataagtgtacttttattaatgtaactaatcatggtttttaaaatggatttaaaggtatttattgtaaaatttttattaaattttaatatgttgtaaattttttatcatctctcttttagcaaagattaatcgcaatggatagcatcaaaataatctactttatacattttaagtgttaagtatattgatgttatgtgtgtattctcatcgatgaaaaaataatagcaatgctaaaaacattgctattaagattaaactgaaaatgaatcacagtgagaataaattaagagactaatcgttcacttaacaacatggtaggacgttcaatccgtttttgggtttgtcgatcaaaaaaatgtagattttctggataaatagcaacacctattctattacccacattaacaccatgatcgtttgcggctcgaataacaatagattgttggtcacaagtggtggcgtaaattaaaacatcagcccctaaagcttcaataaaatcgacattagcatgaaacagtggattttgttgatttatgagcaaatgttcaggacgtaatcctagttggatctcaccattaggtaatgagtgggcagaaatagcaagatgaccatccgcaatttcaataataccgcgattgatatgagtggttaaaatattcatcgccggtgatcccataaatgttgccacaaatacagaagctgggctttcataaatctctaagggggagccaacttgttctatatgaccttggtttagtactactaatttatccgccaaggtcatggcttccacttgatcatgagtgacataaacagaagtagtggctaatttttgctgcagctttttgatttcaagacgcatttgtacgcgtagtttggcatcaaggttagagagcggttcatcaaataagaagactttgggatcacggacaatcgctctgcccatggcaacgcgttggcgttgtccaccagaaagctctttaggttttctatccagtaaatggcttatttctagcatatgagcagcgcgatcgactcgggctatgatttcagctttggggatttttcgattacgcaaaccatacgccatattgtcatagacagacatatgtgggtagagggcataattttgaaaaaccatcgcaatatctcgctcactaggctcatgttcatttacgcgtcgattatcaatcagtaaatcgccatctgtgatggtttctaatcccgctatcatgcgcagtagtgttgattttccacaaccactaggccctactaaaaccaccatttcgccttgctcaatagagagattgagcgtggaaattgcttgataaccattaggataacgtttttctaaattagtcagtgttacggtagtcatattatttctccgtatcaacaaagcctttaacaaaggctctttgcatcaaaatgacgataaagacaggtggcaacattgcaattaaagtggttgccataattttgttccactcaatcacgccatcagatacggccaccatctgtttgatgcccatgacaatggtgtagtactgagtatctgtggtgataagcattggccaaagatattgattccagccatagataaaggtgataacaaaaagtgcggcaatattggtacgggataaaggcaataaaatagtaaagaaaaattttattggccctgcaccatcaattttggccgcttcaatcagctctggggtgatagtaagaaaaaattggcgaaacaaaaatgtagccgttgcactcgcaatcagtggaatggtcagtcctgcataggagttcaacatattaagatttgtcactacctcaaaggtcggcatgatccgcacttcgacggggagcatcaaggtaaagaagattgtccaaaaagccagcattctgccaggaaaacgaaagaacaccacggcgtaagcggaggcaatagagataaccaatttaccaatagtgatcactagcgccataactaaagagttcaatagcataccattaatggtaattgcactattttgagtcgttcccgctgatgaaaagagcgttttaaaaacctcgataccctcctgaccaaaccaaagaggcgagcctgtggcaaattcggtattttggtgggtagtcgcaacaacagcgatccataccggaaatgctacagaaagaatgccaacaatcagaataagatggcaaaaagcgtggaagagaggtctacgttcaaccattagtaagccacctttttctcaacataacgaaattgaataatggtcaatatggcaacaatcaacattaaaataaccgattgtgccgctgatgagcctaaatctaatccaacaaatccatcgttatacactttataaactaatgttgaggtgctattaccggggccaccttgggtcatggcatgaatgatgggaaaggtgtcaaaaaaggcgtaggcaaaattcaccaccaataagaaaaaagttgtcggcgaaattaatggcaaactaatggtaataaaacgtttaattggaccactgccatcaatggctgctgcttctagcaacgatttaggcacagattgtaacgcggcaagaaaaaacagaaagttatagcttatctgtttccatgtggcggttaaaatcaccatccacattgcatgagatgtatttaagaccggatcccaattgataccgattttgtttaatactcggcttaatacaccaatggtaggatcgagcataaacaaccagagaaaacctgcgataacaggagcaatagcataaggagcgataagtattgtgcggtaaaacaatttaccccgtaatatttgctcagcaatacccgctaaaataaccgcagataacattgaaagtaatacaacactggtactaaaaataagcgtggtgattaagctgtcaaaataataattatcattaaataagcgctgaaaattttctaaaccaacaaattcactactaaggccaaaagcatcttctaactgaaaagattgcaacaatgcttgtccagccggccaaataaagaaaactaaagtaatggctaattgagggaagatcagcgcgataggtaaccatttttgtttaaagtaaacggattgggaagccatactgtatccagagatctgacaaaataacaggcgaacacttattgatgttcgccgaataccaaataccttactgagtgcgttcaaatcggcgtagttgttcatttccccgtttaaccgcattatccaaggcggcttgagcgctctgtttgcctgaccacactttttctaattcttcatcgacgatttctcgcgtttgtaaaaagttaccaaagcgcaagccttttgagtttgctgtagagtcagaggtggtcatttgtaaaatagccgtatcagcaccaggattttgctgatagaacccctgttgttgtgttaatgcataagctgctttcgtcacaggtaaataaccggttgcttgatgccaatctgcttgtacttcagggctagaaagataggtaaagaatttagcgacaccgttatattcagcatcagggcgacctgccattacccataatgaggcacctccgataatgctattagcaggtttatcaactaaagtatcgtcataaggcaattggctaacaccaatatcaatgcctttcatattctctttaatacccgcaaagcctgcagatgactccatcaccatggcgcattcttgagtataaaatagcggcatagcatcagattggcggccaccatatttaaaaataccggatttagaccaatccgccatgcgttggatatgagtaacaaacggtgcctgattaaataaaaatgaggtatcagtcccatcaaagccgttatttttggtggcgataggtaagttattacgagcgccaaaattctctatttgggtccatgattgccaagtggtggtaaaaccacatttcacgccagcatcaagtagtttctgagagacagcccccatctctttccatgttttaggaggttgctctatgcctgcttgtttaaatagtgctttgttgtaataaagcacaggcgttgagctattaaaaggtagagatatcatcttaccatcgctggtggtgtaataagcggtaactgtcgagaggtagctattaggatcaaatggctcgttggttttttccattaattggtaaacaggaaaaacggcttttttagctcccatcatacttgctgttcccacctcaaacacttgaacaatcgcaggttggtttttggctcgaaatgcagcaacagcgctggtcatcgtttctggataagtccctttatagacaggtttgatcacatattctgattggctggcattaaagtctgaggcaatttgattgactttttgacctaaggcgccccccatagcatgccaccactctatttcggtttttgcgtaggttggtgaagtaaataatgctattgctatggcaagcgtactgaaggatttaatcgacatgcaaaatttcctttttatttaaatacgaaaggcgcaatctaatttaagaaataccctaagcgttctttatgacaaatgggtgacaattaaatgaagatatgttgatggtgtgactgtcaaattgctgtcataaatggttgtcatgatggcgatatcaacgaataaggagagaaagatgaaaatagccgctcatagaggattttctggaaaggcacctgaaaacacattagctgcatttaaaatggcaattgattttgggtgtgaatggattgaaaccgatgtgcaattaacggcagatcatgtacctgtactgatccatgacaagacggttaatcgttgcacgaatggacaaggtgcggtgcgctttcatagtttggatgatttacaccgtcttgatgcaggcagttggtttagttcactttatcaaggggaaaaaattcccacactaagacaaggtttgcagttgataaagcgctcaggcactaagctcaatatcgaacttaaaacatggcctgatgatgatgtagagcgcttatgtttagcggtatctgaaatgataaaaagcgcagatatccctaacgaacaaatcctgttttcctctttcgatactcatgcattaatggtgatgaaacgttatctgcccgccattcgtcgaggacagctatgggatgatattcctgataatgcactagaaactttacaagctatagaggggtttagcgtgcattgtaattatcaatatttaacgcagcaacaagcggctatgttgaaacaagcaggctatgaaatttattgctatacccccaatgatcctaaagaagtgaaagattttgaagcatggggagtcgatatgttgatcactgatgtcccagatatttatcaacagaattaatgtgctttttataaggtatctgagtgaatgacacagatgccttataatgcttatttttatcactaatctgtcaatatatggctagtaggataggccttattataattatgaggatttaaccgtgcaaataatcccatagttaatatcactaagacagcatgaaaagcccaagcataggtaaaactaccatcatcttgttgtagccatactgcgatcagtggcccaaaagaggcaataataaatccgccaccttgcatcaaggctgatagtgctcctgcgtgtaatggatgaggaacatgatctaatgcggcaatcatcatcattgagaaacaaccacccaacccacagcctaaaaagatactccatagataaggggcgctcattggcattgtcatcagcgctaaaaatccaataagttggcttgtcagtgttaaaagtagccaaaaacggcgatcatgatttttggcagcaagaaatggaataattaatgctgctgatgcttgaaagagtgacaaaatagcaactaatgagccactttgtgcacttggcatacctaatgattgatagaagggagctaaccatgccaccatcgaagcgtaaccggcattaacaaagccaaatccaacaattaataaggctgttcttggtcgccaaatcaatgtattaagtggcagtttattggtttcggaaatattctttttaattgatagcgtaatagcaactaatgcgacgctcgcgggtaacgcaaaccaagcaagagcctgttgccaattgccatcagatgccgtaagaacaggggataactgagcacctaatgcacctcctcccattagcatggctgagtagagacccatcataatgggagttttctgtccaaaccacgctttgatgatgccagggaaaaccgcttggatataagcgacacttaaaccacaaaatagagcagtaataagtaactgatcaccatcagaaacataggcacgagaaaacgatgctaataataagataagcatcgcaacttgtagccctctacgagcttgaatataaggttgtaaaaagggcacaaccaaagcaccgactcccattaaaatcatgggtaataacgtgagtaatgagacttggctatagctcatgcctgttgaagcaataatattgtcaataacagggccaggcccggttaaaaaagggcgtaaatttattcctactaaaatgatagtaaggacaatctgccacatattttttcgtggtaaggctgtcatagtaattccctgataaacatcaaatttgtctattgtatagacaaagtttgtctaaaaaaatgctaatagtaaagataaagtatcattgttttcagttaaggttagcattattaacagaatatagaactctaatctgaagatgatattttcccgaatttgctctatcagttgtttcctaagtaaatttatctaaatgatatttggtttcttttatattaatattagcaggaaggtgtaaactggtttattattttataccgaaaaatataaataactaaggtaagttaatgttgagtatggaaaaaattaagcaaccctattggccagcattaaaattgatattaagttcacttattgtttttagtttctatttgaaacaaagccatacccctgacttttcattactgattaatatatttgatttaacattaattcctatgtttgtttttattatcgggtttattactaaaaatgggacatggaaaagttggcgtgataatttattggctgccttagtgatttatgcgactttccaaactattgatatgatccctctttattattcagggcaatttgaccttaatacttaccttctttttcctcaaaatggtgtgtggttttttcttgctacacctatttggcaagcttttttcctattgttaccttcatacatcagacatcataaaccaatattattctctcttctgcttgtcagtattttgctatcgttgttaactaaaggctatgaaactaaactatccactttcttggctataatacaatattttccattttttattatcgcttatttagtagaccaacaaactattgctaaattgagaagtcaatcttctgtggttattgctttaataagtttattatcaatatttatactttattatcaatctaatatcaattatattattctaacaaaattagaagggagtctattttttgcaaaattaattatatatattatctctttattgataagttttattttaagcgcagggattatttaccttgcaccaaccactcaaaaatacgcttctcttgccaataatgcgttaggtgtttatttaattcatccaattatttgttttatccttttacaaggcataatcttttttcagttatctcttacattaccgatggtttttgcactcatcattatcacgattagcctagcactattattggcatcaattaagcttattcattggtttattagcccaacttttaatatccgatagcttagtcaacatgagtggagaagaatgccattaatttttctccactaagaataaaatcgtatgttcactattaatttgttttatttatataaatcaattattttatgtctttaatgacatttaataaattaataatgcgatatttagtctatttaggacttgccggtgtattgctcagttttcctatctcatttgtagtaaatatctttcttcttgatgaaggatataaaacgtgtgataaaatttcgtggctatcacccactacatatgtaaaagaattatcgttttgcaataacaaaaaagcccttaacaaataatgaaaagggctttttaattcaatgtattatacgacttctattaattcatgccgtattttttcagtttcttacgcagtgtgccacggttaatgcccatcatttgcgcagcacgtgtttggttaccacgggtgtattgcatcaccatgtccaacaatggctgttcaacttcagccaataccagctcatataagtcattaacatcttgaccgtttaattgagcaaaatagttcttcagtgcttgtttaactgagtcacgtaaaggtttttgggttacctgatcttgtgaatttacagtggcaacggttagtacgtctgaatttacgcgttgttcgaacatagttctgtcagctcttttatttatttacgcaaaaaattttcgaaatatgcttccaacgcctccagctgttcgctggcatcctctatggcgttgaaggagcgccgaaactggtcatcaggggcatgttccttgagataccaagagacatgcttgcgtgcaatgcgagttcctttgccttgaccgtaaaagtcgtgcaattcacgcacatgcttttgcattatttgttgcacctttgcaatcggcagaggaggcaacagttcacctgtgtccagatagtgctggatttcccgaaagatccagggtcttccctgagcagcgcgaccgatcattaaagcatcggctccagtgtagtcaagcactgctctggcttttagcgggtcagttatgtctccattcgcaataatgggaatagagacactctgcttaactgtccgaatactgtcgtattcagcttcacctttgaacaaacactcgcgcgtacgtccatgaatggtgagagccgcaataccacaatcttcagccaatttggcaatctctacacagtttcgttcatcaggtgaccatcctgtacggatcttgagtgtaacaggtacatcaaccgcattgaccaccgcagaaaggatctctgcgactaaatccggataacgcagcaatgccgagcctgctaactttttattcaccttttttgccggacaacccatattaatgtcgataatctgagcgccaccttctacgtttattttcgcagctgtagccatatcaacagggtcacttcccgcaatttgtacggagcggatccccaattcatcgctatgtaccatccgtaaccgagacttgtctgtcttccaaacctgaggattagaagaaagcatttcagaaactgtcatccccgcacccatgtcatagcaaagtgaccgaaaaggtcggtctgtaacgccagccattggagctgcaatgaggcaattttttaactgatactgtccgattcgcatagatgaaaagagggccaaactgtgactgcaagggcgcgtatattacgcattttttaccagatatgaaaggacaaagtttaaccaaatcgcgaaaaaaagttacttttttatacttgattttttataaatagattatttagtcaataaaaacaaaatgttactgtttttctaaaattttaaatttaaatatagagaagtaacaaactcaagcaacaaggtgatatttatcaggcaaaattgtgattaatgcctgataaataatcattaagtgaaactttaactgtttaatattatcgcaaattgtttaatatttaacctatgttattttttcactccggtaatacgacaccactcttctttttcagccacaggatctaaagtaaattgttcttgataagcttgtgcaacaccgtcagcttgtgtggcaagaacaccggaaagacctaaatgccccccttgacgtggcagtgtgctgataataggagctaattcacgtaatggaccagctaagatatttgctaccactacatcggcactgagattgtctggttggtctttagcaaggtatagcgtcagtgcatcagcgacaccgttacgttgcgcattgtcgcgacttgcttggatagcttgtgggtcgatatcgatacctatcgctttcgcagcccccagttttaatgctgcaatggctaaaatacctgagccacaaccaaagtcgataacggttttacctgcgagatctaaaccatcgagccattgtagacataaagaggtggttgggtgagtaccagtaccaaatgccagacctggatcgagcatgacatttacagcgttaggatcaggcacttcacgccagcttgggcaaatccataaacgttcgccaaagcgcatagggtggaagttatccatccattcgcgctcccaatctttatcttctaattgttcgattttatgtacaaatcctttacccagcaccgccgtgttttctaacatagccacgatgatactcatatcggtttctgcatcatataagccaataacatcggtatcaccccagaggcgagtttctcccggtaatggctcaaaaataggggtatcgtggctatcttgaaaggttactgataccgcgccactttcaaccaactcatcaccaatggcttcggcgttttctgaggtggcatttagtcttaattgtatccaaggcataattaatctcttttaaaaacaagttcactgtaatggagcagattgaggcaaggtttgttctccaaacctatttgcgacaagaaaagccactaagctcaataacagcgcaggaataataggatgaaatccagcaatctggatattaaatgttgccagtgtagcatagagtgtggcaccggttatcatgcccgcaatcgcgccataacggtttgctttgttccagtaaaggccaagtactagaggccataagaaaaccgcttgtagtccaccaaaggcaagtaaattgagccaaattatcattgatggcgggttccatgcagcaaatagcaataagatccctaaaatcaaagtagataggctagataaacgcgcaatgcgtttttcattgtttatggcatgaggcgcgagattgagatagagatctttgaccaatgtcgctgatgattgtagcagttgtgcgttaatcgttgacatgatggctgccatcggtgccgctaaaaatataccggcagcaaaaggtggtaatacatcaaccattaaggttggaataacttgatctggcacggtgagatcaggaatgattgcccgacctaatgcgcccgcaaagtgcataccaaacattaataacgccatcacgatggtgccgatgatgatccctctgtgcatggctttgctgtctttataagagatacagcgcactgcagtatggggaaggccgataaccccaaaacagaccaatacccaaaatgacgccataaaggggccagttaaaatgccgtcagcaccatgaggagaggtaagggcaggatcgatagcatttagtttttgtattgcaatatctaaaccacccgccttgtagataatggcaaaaagcaaaataaaggtgcccaataacatcacaaggccttgtaaggcatcatttaatacactggctctaaatccgccaatcgctgtatataatgcgattgagataccaaatatcagcaaaccaaattcatagggaatacccgccgcggtttctaataagcgagcaccaccaataaattgtacggtcatggcgccgacaaaagctaccagtagacttaagctggcaaaccagactaaaaagcgactttggtagcgagcatagagcatatcatttagggtgacggcgttataacgacgcgccaaaatagcaaattttttacctagtaccccgagggagagccaaatagcggggagctggatcatcgaaagaagtacccaaccaatgccgtatttgtaagccgctcctggtccaccaataaaagagctagcactgacataggttgccgtgatggtcattgcaaggacaaatccacccatagagcggttaccaagaaaatactcgttaagaaattgccctttttcacgtttacgatatgcgtatgcggataataggaagaccaataagagatagccaaccagtggcacgataacctcagtttgcattgtcatgctcatctcctaacggcatatctttgaaaaaatagcgtaccatcagataacacagtaaaaaaaatagcacaggtaaaaataggcatgaaagctcaaaccaaaccggtaggccggttagtcccacactattatcgggtaaataggcagtaagtaaccaacccaataagtagataaaagtaagcactaaggccaagagggcttctttgtgggcctgaacaaaacgcttgtccatctgttctcccaatctttataggattaaaacgaatgggaaggattgtacgggaaagtgagaggtgattcagtgaaaattgatcataaacttattggtggcatcaaatgatgaggaattgattggcggttgagtgtgctgcaggaacttatttggttatttaatagactatttagtcgaataaaaaaggcatagtcgataaactatgccttttactgataagctaaaaagattaattttcagttaaacctaggcgtttttctaggtagtgaatattagtaccacctttttggaattgctcatcattcataatgaattggtgtagctcaatattggttttaatgccgtcaataataagttctgccaacgcatttttcatacgagaaatcgcaatttcacgtgtttcaccgtaagtgatcaatttaccaatcattgaatcatagtgtggtggaacggtgtaacctgcgtaaatatgtgattcccaacgtacaccaaatccgcctggtgagtggaaacgagtgatggttcccgggcttggcaagaaggtttttggatcttctgcgttgatacggcactcaatagcatgtccatgaacgtgaatttgatcttgcgtgaccgataatggtaagcctgatgcaatacgcagttgctctttgataaggtcaacaccggtgatcatctcagtaacagggtgctcaacctgaatacgggtattcatttcgataaagtagaattcgccattttcatagaggaattcaaacgtacccgcaccgcggtagccaatttcaatacaggcatttgcacagcgttcaccgatatttttacggatctcaggggtaatacccggtgctggtgcttcttcaaccactttttggtggcgacgttgcattgagcagtcacgttcagctaaatagatagcattaccttgtccatcggccatcacctgaatttcgacgtggcgtggattttcaaggtatttttccatatagaccatatcgttgctaaatgccgctttggcttccgcacgggtcatggagattgcttgcgctaagtctttttctgagcgaacaacacgcataccgcgaccaccgccaccacctgatgctttgatgataacagggtaaccaatgcgtttggcgatttcgatatttttggcggtatcgttacctaatgggccatctgagcctggtacacaaggaacaccggcttttttcatcgcttcaatagccgaaactttatcacccattaggcgaatggtttccgctttagggccaataaaaataaagcctgagcgttcaacttgttcggcaaaatcggcattttcagacaggaagccatatcctgggtgaatggcttgcgcgccacttatctctgccgcggcaataattgccggaatatttaagtaactttttgctgaagcagcgggaccaatacagatagtctcgtctgccagcagaacgtgttttaaatcacggtctgccgtggagtgaacggcgactgctttgatcccaagttccttacaagctcttaggatacgcagtgcaatttcaccacggttggcaatgaggattttttctagcatgggcctgcctcgttattcgatgacaaagagtggatcgtcaaactcaatagtatcgccatcttggcaaaggatagatttaacaacgcccgctttatcagattcgatttggttcatcattttcattgcttcaacgatacacagtgtatcgccaacattgacttgctgacccacttcaacaaagacttttgcttctgggcttggtgaacgatagaaggtacctaccattggtgagcgaacaacatggccgctaatttcttgcgttgctgtagccgctggtgtttctggtgctacaggtgccacagcagctgctaatgcaggttgaggtgctgctggtgccgcaaaatattgctgaggagccatttgaccctgaacgccagagttgcgactgatgcgtactgactcttcaccttcagaaatttccagttcagaaatgccagactcttcgactagctcgatcagttttttaattttacgaatatccatgagttgattccgtactcttttgatgttttttattaagacaagcggttgaccgctgcctgtaaagcaaatcgatacccttcagcacctaatccacagattacgccagttgcgatatcagaaagataagagtggtgacggaaaggttcccgactgtagacattggataggtgaatttcaataaatggaatattcacccctaataatgcatcacgcagtgcaacactggtgtgcgtaaatgctgcagggttgataagaatataatcaacatttccccgcgccgcatgaattttatttattagctcatgttcagcatttgattgaaaatgagtcagtttcacatttaatgcttgagcatccgctgacaaactttgaacaatatcattcagagttaggtgtccgtaagtttccggctctctagtgccaagcaggtttaagttcggaccattcaggagcaaaatatgaaaattttccgacattatgcttctatctccgtcaattcgtcaacgaaatgacaaaataacctgtgcttttcgttttgtcatcttttattgtatcgaatgttacgatacaaatcacaaagtccgacattatagacatttcacagaagataacagcaaaatactggtctaatcagggaaagatgggattattttgatgaaaagttaaaagtttttacaagattgtaaaaccaagaaagtaaaataaacagaagtttaaaaaataatcataacatgacgttatttattgatgtgacaggaaatctacgcttctttgagctagatcgataatatatgttataaatgtgatccagatcacattactaaccaggcttaatattaaaaacgcaataatctggcattaaattaatctgtttaatgccagaaattagctcaaaatcatgataaataattacaacttaactaaggttctacctgttacttgattatccattatcatctgagcatagcgtggcacctcatcgagtgtaatttcagttactgtttgctgataaaatgtatcaggcaatagctgtagtaaacgttgccatacttgagcgcgtttttctgcaggataataaacggaatcgataccttgcagacgaacattgcgtaaaataaatggcatgactgtagtaggtaacgtatatcctcctgctaatccacaggcggcaacggtgccattgtaatgtgtttgtgacaagatattggcaaggatttgtccacctacggtatcaatagcgcctgcccaacgctgtttatctaacgctttacccgcagcctcaaatgcttcacgggtgataatatgctcggcccccagtttacgtaaataatcgtgattgctggctctgccactgagagcggtaacctgatagccaagtgcggttaataaactaattgcggtgctaccgacaccaccgctggcacctgtaaccaaaatctcaccactatcgggtgttatgccaccttgttctaacgccatcacacaaagcatggcagtaaaaccagcggtaccaatgatcatggcattttttaacgacagtccttcaggcagcgccgttaaccaatcacctttaacgcccgctttttgtgctaaaccgccccagtggttttcacctaccccccaaccggttagtaacacatgttgtccaatatgaaaacggggatcttctgtatggtgaaccacccctgaaaaatcgataccggggaccatcggaaattggcgtagaatttttcctttacctgttatggctaagccatctttgtagtttagtgtcgagtagtggacatcaacaatgacctcatgaataggaagttgtgattcatcgatatgttggacgccggcgctaagtttatcgctgtgttgttcgactaataatgctttcatgatgacctcttattgctatccgtttctgtcatgataggtgattttttagcaagcgttgtgattgtgcacaatatctcgtgtaataatgagacaaattaacgctttttagtgtataaacgatgggttctatgttcatttaagcagagattattctgagttttacatttttgttgtgagttgatacttaaaatattttacgattgggccaaaaataacatttatcttcgtttattgaaattaagctaataggttgttttggccaccatcaagatgagtatgatgatcgctatcttcatcaaatgatggggtaaatgttatcgaaaatagatattgctgatgtgaataattaaatgaataaattttatttgaacttgaacccttacttttgtgtcacagtgtggcaaccaagtaagatttttctttgtcgatatctacgtgatttgtattgtgattaagtcaaataaatcttacgtaggatcgaatttatgcgttaatcgttttaattagcccatttttatgcagtttttttctgctccaattgggaaaagtaacgtagaatattgtgcctttatgattattcacgtgtccacttttaactaagtagcggatcgcgccttgtcgctgcttattgtggttggtagagtagacggatttttccgtcccggcttgcaggattatcctttcgtatgtttaaaaaatttcgtggcatgttttccaacgatctgtctattgacttgggtaccgccaataccctgatttatgtcaaaggacaaggtattgttctcgatgaaccttctgtagttgcgatccgccaagatcgcgcaggtacatcaaaaagtgttgcagccgtcgggcatgaagccaaacagatgctagggcgtacacctgggaatatcgcagctattcgtccaatgaaagacggtgttattgctgatttttatgtaaccgaaaaaatgcttcaacacttcataaaacaggttcataacaacagctttatgcgtccaagccctcgtgtattagtgtgtgtacctgttggtgcgacacaagttgagcgtagggctatccgcgagtcggcacttagtgcgggtgctcgtgaggtctttttaattgaagaacctatgtctgctgcaattggtgcaggtttaccagtatctgaagcgacgggttcaatggtcgttgatattggtggtgggactacagaagttgcggttatctcattaaatggtgtggtttattcctcttctgtacgtattgggggagaccgttttgatgaagctatcattaactatgtacgtcgtaactacggttcgttgatcggtgaagcaaccgctgagcgtattaagcatgatattggctcggcttatccttcagacgaattaaatgagattgaagtacgtggacgtaatttagcggaaggggtaccacgtagctttactttaaattccaatgagatcctcgaagccttacaagagccattaacaggtattgtaagtgctgtgatggttgccttagaacagtgtccgccagagcttgcttctgatatttcagaacgaggtatggtcttaacgggtggtggggcactgttacgtaacttagaccgtttattaatggaagaaacaggtattcctgttattgtggctgaagatccgcttacctgtgtggctcgtggtggtggtaaagcattagaaatgatcgatatgcacggtggcgatctatttagcgaagattaatattattgtgcgagtaagggagaaaggattcccccttaatcacaatataacaatattaacacctgttcttttacttctccgtgtgagtgatcttagagtttatgaagcctatttttagtcgggggccttccctgcaactaagattaataatcgctgtgattatcgcgatatcgttgttaattgctgataatcgcataggtgctttttcaaaagtccgtcagtatttggatactgctgtgagtcctttctattttcttgcaaatgggcctcgtcgtttccttgatcaactctctgaaacctttgcaactcgcgaacgtttacaatttgaaaatcaagcgctaagaaaagagcttcttgttcgcagtggtgaaagtcagctactggaacaatttaaacaagaaaatgcccgcttacgagaattacttggttcacctttacgtcaaaatgaacaaatgacggtaacacaagtgttgtctggtaatagtacgccttatcgagatcaagtggtgatagacaaaggcactaatgatggggtgtatgaaggtcagcctgttattagtgataaaggcgttgttggacaagttattgccgtaagtgagttaaccagccgagtactgttaatttgtgatacctctcatgcattaccggtacaagtattacgtaatgatattcgcgttattgcctcaggggctgggtgtgcggatgatctactgttagaggcactacctgcgaatatcgatattcgtgtaggggatgtgttagtcacctcaggattagggggacgctttcctgaaggttatcctgttggggttgtttcttcggtaaaagtcgataatcaacgtgcttattcggtgattaatgtgcgaccttctgctgaattacaacgtttacgttatctgttgctattatggaacgcctcagagaagaaacaagcgccaccgttaccctcagaggtttaccgtgctgccaatgaacgtttgatgcaattaatgccacaggtactgcctaactatgaacaagcggggccaccactgcctcgttctatgtcacaagagccaacggaaaatagcgccaccccaagtgatatagcaccagtaccaccaacggaaaacaataaacctcaacctaatacgaatcgaggtagatagtgacaatcaatccttatcgtagccgtgggcgttggattatttggctctcgtttctaatagctttggtgttacaaattatgccttggcctgagcaactagaagtttatcgccctatttggccagtgttgtttctgatttattggataacgtcattacctcatcgtattagcgttggaacagcatttgttcttgggatgagcatggatttagtgcaagggacaacattaggcgtaaatgcgttggcttataccctagtaagttatgttatcgcctttaaatatcaattattttgtaacttagcgttatggcaacaggcattagtggtaatgttagcgattggtgtggttgatcttactgtattttgggcagaatttttgctttctcccgtgacttttcacccacaagtattctggaatagtccagtcagtggtattctttggccatggctttattttttgcttcgcaaagtccgtcaccagttttcagttcattaacctctctggatcatgacggtatttttgtgtcaccgtcatgaggatattattgtgatcactctttaccttgcatcgagttcccccagaaggcgagagcttctgtcactgttggatgttcaatttagcaccattacaccggcaattgatgaaatttggcaacaaggtgaagcaccagaagattatgttatccgtttggcgagggagaaatctcaagagggggtacgtcaagcgacaaatgactatccggtattaggctctgatactatcgtggttcaagcaggtcgtattctggaaaaaccacgagataaagcgcatgcagcacaaatgctaagtaatctttcaggtgcaacccaccaagtgatgacggcgattgctatttcagataaaacccgaacaataagccaattagttgtcacggatgtgacttttagaaagatgacagaaagtgaaattagtgcgtatattgaaacgggagagccaatggataaagctggcgcttacggtattcagggaaaaggaggccgttttgtacaacggattgagggtagctatcatgctgttgtcggcttaccgcttgttgaaaccgaagcattgatagctcaatttttgtctctagcgaatgataaggagatttcatgacagcagagctattagtgaatgtgactccctctgaaacccgagtggcctatatcagcgggggcatactacaagagatccacgttgaaagagaagccaaacgaggtcttgtcggaaacatctacaaaggtcgggtaagtcgtgtattacctgggatgcaagctgcatttattgacattgggcttgagaaagccgcttttttacatgcttctgatattatgcctcacacggaatgtatcgcgggtgaagagcagaaaaaatttaatgttcgtgatattgcgcaacttgtacatcaaggtcaggacttgattgtacaagtggtgaaagatcctctaggtacaaaaggggcacgtcttacaacagatatcacattaccatcacgttacttggtgtttatgccgggggcttctcatgtgggtgtttcacaacgtattgaaagtgaagaagaacgtgagcgcttaaaacgcttggtagaagagtattgtgatgaaaatggcgggtttattattcgcactgccgctgaaggtgtcggcgaacatgaaataaaacaagatgctgcttttttaaagcgcctatggaataaaatcattgagcgtaaaaaaagaaataaaacgcgtattcaaatttatggtgagctcgctttagcacaacgtattttacgtgattttgcaggggctgaattagatagcattcgggttgactctaaattaacttatcatcaattacaggagtttattggtgaatatattcctgaattaaccgctaaacttgaattacaccaaggtaatcaacctattttcgatctctacggggttgaaagtgaaattcagcgcgcgttagagcgaaaggtcgagttaaaatcaggaggctatctgattatcgaccaaaccgaagcaatgacaacgattgatatcaatacgggcgcttttgttggtcatcgtaatttagaagagacgatttttaataccaatgttgaggcgagtcaggcgatagcgcggcaactgagattacgtaatttaggcggcattatcattattgattttattgatatgagtaatgaagatcatcgccgtagagtattagcttccttagaacaagcattgagcaaagatcgcgtgaaaacgaccatcaatggtttttcacaattaggtttggttgagatgacacgtaaacgaacccgtgaaagtctcgagcatgtactttgtgatgactgtcctacttgccaaggccgtggtacagtaaaatcagttgaaacggtatgttatgaaatattacgagaaattgttcgtgttcataaaaccatagacgcagatcgctttttggtttatgccgcccccgctgttgtggaagcactaaaaggtgatgaatcacatgctttagccgaagtggaaatttttgttgggaagcaagtcaaagtgcaaactgagctactctatagtcaggagcagtttgatgtggtgatgatgtaatggattcgccttgctaataaatatgatggcagaaaggagactaaatgaagcggctgtctaaatctttattattgataacccttttttgcctgattattttcgccgtagtattaagtggatttcgttattttctgcctcgtttagataattatcgccctgaaattgaaacctatttatctaaacagttcaatagcccagtcaccatgacacaggtgaaaggagaatggcaaaactttggccctgatatccaaattactgggctgtatattgataataacagtgttgaagtgagtgctgaacagatcactttctcttttgatgtttggcgttcactacttcattttcaactctattttcgtgaattaacctttgaacaattagcagtaaattacaaaaagcctatttttactgggcaaaatggtgatattactttcactgaacccgatgatatctcttccattttcttaaaacagtttgatcgatttaaattggttgatagccgtttcgtgtttttatcaccttctggtgacactagcacgctccatattcccgaattaatgtggctcaatcagaaaaaccgccatcgtgcgcaaggggaagttactttagataccccaataaatcactatggtggactaaaagtacgtcttgatctctatacgaaaaagcagggggcactggataaaggacaggtgtttgtcaccgctgatgaggttgatatttccccttggttaagccaatgggttaaaagtaacagtggccttggtgaagcgaaagccagcctatctaattggatagagatcagcaatgggcggatcacgggtagccagttacaaatccatcaaggtgaaatggattggcgtaatgaagggcgcacacatgtattaaaggtagaagatttaattctacgtatgagacgccaagaaaatggctggcttgctgatatcccttatacccgaaaaataacgatggatggtgatgaatggccagatggttatttagcggtactttatcaacctaaagaaaaacaacaggatgaagcttggcgtatccgtgctaaaaatattgaattagaacggttatctgcgttattgcctttgttctcctttttaacgcctgatgtcgtgcgccaatggcagtatcgtcaattttctggcatggtcgactcatttgctcttgatttagcccccgatgattttaaacgtagtgccattgatatcagttggcaaaatgttgcttggaaacgctggcaagaaatcccttctgtggcacattttaatggtcatttaaagggcacattacagcaaggagcgcttaattttgcgcttaataacagtgaaattgatactgctgggctttttaaagcgccacttaatatagaaaaaggcactggtacggtttactggcagcatcagggagattctctgtcgttatggagtcaagggattgatataaaagccacctccgcttgggttgccggtgattttcgttatcaaaaacaaggagagcatcaacaactgtctattctttcgggagtgaatgtgaccgatgccggtgagacatggcgctatttacctgaaaaatatgtcggtaaagatttaacacaatatctctctgacgcgattattgctggaaacgttaaaaacggtacgtttatttttcatggtgatccgcgggatttcccttttgaacaacataatggttggtttcaagtctatgcaccagtaaaacaggcgaccttcaaatatgatagtgaatggccggcactgtttgatcttaatgttaatcttaattttaagaataacggcttatggatgtcctctgataatgttcaggttggtaaagccaccgctaaaaatttgacggcgattattgaggactataacaaagaaaaaattgttattgatgcagatattgaagccacgggcgatgatttaaaagagtattttctagcttcgcaaatggcaacgattggtcatacacttgaaatactaaaagtggctggaaaaattaacgggagtttgcatctcgacattccttttgatggcgagcaggtggtcgcttctggtcaggtaaacttaaacaataacgatgtcacattagcctttatggataccaccctagaaggtgttacgggacaatttcgttaccataatgataaattagagagtgatactttaaccgcgaattggtttggtcaacctctgacattttcttttgctggtggtgatcaacgggatgcttatcaagttggtgttgatctaaaaggacaatgggatatcgggaaaattaagggattacctaatgatatacaacataaattaagcggttttttaccttggcatggcgcggtgagtgttaatattccagaaacagcggatgttaattatcaagtggatctgaccggacaagtgaatgcgctacaaagtcagttagctgcgccaagtaccgatgactttaaaaacgcttcccccattgtgatttcagcaaaagggaatagtgaaaaacttaacgttagtgccgatgcacaagatcagtggtcattaaatagtgaatgggcgttaggtgaaccattacgtctattacaaggtaatttagtctcttcctcgctcacactacctcaattaaatgatcaatcacgattgactattgctttgcagggattgcaaggcgataaatggctacctactttaatggctttttcatcattagccccttctgaaaacgcgatacgtttccctaccaatattcatattagtctgcctgaacttaattttgctggtcagcaatggattgcgccacaaacagaaattatgcgtgctgatgatggtgtaaaattatccttctcagggagtgagttacgaggtgacttatttgtacccaatacggcacaaccttggcaggtgaatattacctatctctattttaatggcgctagcccaacagaagaaaataaatccttaaaaatggcaaatgtgcctgatgccaaaaaagcagttcaattttcacttaaagatattcctgctatcaatttcgcctgccaagagtgttgggtgaatggattattactagggaatattgaaggtgcaatacagcctcgtgacggagcattattgttaactgcaggtaagcttaaaaatagcagtggcgagctatctgtgagtggtgtgtggtcagaagatagtttaggcaacagtatcactaagttggcaggtaaactaacggcaccggaagtcgatgaaatggcggcttactttggttatatcattccgattgttcagtcaccacttacggcagatttctcactgcagtggcacaataccccttggaattttgatctaaaaacactcaatggtgaagtgaatgcttctcttggaaaagggcgtattgaaaaggtggatgttgggcaagcgggaaaattattacgtctagtcagttttgatgccctgttacgtaagttgcaattcgactttagagatacttttagtgataattttgagtatgattccattaaaggtgatttgacgattaaacaaggtgttttaaacgcgaaaagtgttgctgtagatggtgttattgccgatattgctataaaaggtcaagtggatctgttggcgcgtaaaatggacttacaagtagtggtaactcctgaaatatcagctacagtaggcgttgctaccgcatttgctattaaccccatcgctggtgctgctgtatttgcagcttcaaaagtactggggccactttggagtaagatttcagttatacgttatcatgttaccggaacggtagaacaacccaagattgacgaagtactgcgtcaacttaaggaggatcaggcgttatgaaaaaagttaatgtcgcacttttgcagctttgtagcggaaaaaatataaaaaataatctggcgcaaatagagcaacagattaagcaactccccgattcagtcaagcttgtattaacgcctgaaaatgcattacttttctccagcgcaaaagattatcataaacatgctgaaattcaggggaaagggccattacaagatgcgattgctaatatggcgcagcgctataaggtgtggatcttagtgggttcaatgccattgattagccgagattctcctgagcagatcaccagtagtagtttagtttttgatgatgaaggggtgatccgcgctcgttatgacaaaattcatatgtttgatgtgaacattgatgatgaacaaggcgaatataatgaatcagccatttatcaacgtggtgaacgcttgactgtagtggatacacctgtggggaaattaggtttaacgatttgttatgatttacgttttcccggtcttttccaagcattaagagaaaaaggtgctgaaattatttctgtaccggcagcctttactcgtttaacaggtaaagcgcactgggagccattgttacgcgcgcgggctattgaaaatcagtgtattattttggcaccggctcaagtcggtacccatgatgctcgtcgcacatggggtcatacaatggcagtggatggttgggggaaagtattgaaaaagaaccctgatgcggtcagtgccctaacgctcaatattcgagtcgatagtttagaaggtatgcgtgaacagatacgggttgtgaaacataatcgctttcgcccgaaactgacacacttaataaaaaaagttaaggataaaaaagaattatgagtttagctgttgtcagcgaaagtctgttggaagcgaacaacctgagtttagatgatttagcatcgacactagagcagcttgcacagcgtcaaattgattatggtgatctttattttcaatcaagctaccacgaagcatggatattagatgatcagataattaaagatggctcttacaatattgaccaaggggttggcgttagagcgatttatggtgaaaaaacaggttttgcttatgcagaccaattaacactcaacgcacttaaccaaagtgctcatgctgcgcgtagtattgtgcaagcacaaggcaatgggcagatccatacactgggtgctattcaacatactccgttatacaacctaaatgatccattacaaagtttgtctcgtgaagaaaaaatagcactattacatgacgttgatcgtgtggcacgggctgaagataaacgtgttaaacaagtcaatgcctcattaacgggagtgtatgagcatgtgctagttgctgcaacggatggtactttagcggcggatgtgcgtcctcttgtacgtctttcagtaagcgtactggtcgaagatgacggtaaacgtgaacgtggttcgagtggtggcggtggtcgttttggttatgattattttctgactaaagaaaatggcgaaacccatgcagcgacttatgcccgtgaagcggtacgcatggcattagttaatttatcggctattgctgcaccagcaggtacaatgcctgtggttttaggcgccggatggcccggtgttttattacatgaagctgttggacatggtttagaaggtgattttaatcgtcgtcaaacatcggtattctctgggcgtattggcgataaggtaacttctgagttatgtactatcgtggatgatggttcaattgaaggccgacgaggctccgtggcgattgatgatgaaggcgtaccaggccaatacaacgtattaatcgaaaatggcatcttaaaaggctatatgcaagataagatgaatgcgcgtttaatgggggtaaaaccgacgggcaatgggcgtcgtgaatcctatgcacatttgccaatgccacgtatgaccaacacctatatgcttgcgggtaaatcttctcctgaagagatcatcgccagtgtcgatcgcggtatttatgcgccaaactttggtggtgggcaagttgatattacctccggtaagtttgttttctcaacttcagaagcctatttaattgaaaagggtaaaattactaaaccaattaaaggcgcaaccttgattggttcaggtattgaagcgatgcaacaagtttctatggtgggtaatgatctcgcattagataaaggtgtcggggtgtgtggcaaagaggggcaaagcttaccagtaggggttgggcaaccgacactgaaattggataagttaaccgttggtggtactgcttaacagttgttattgttatctatttatacaaattaccccaataaaactccatcgctatgatggagtttctatttaagtgagtaaatggagctatttatgggcaaacgtctattccctgttcttattgttgtggctgttttattttttgttctgtataaaggattagtacctgaaacgcagataccagcaacagcgcctcctacatcaacaacatctacatcgtcaaagagttcaatcagtcagcctgagtctcaacgtcctttagcaattgatgaaaagacccaagccaataaagtggctgattatttgcaacaacacgctcgcttacctgatttttatatcagcaaaaaagaggctcgagctaaaggttggaatgcgaaagcgggcaatttatgtgacgttttaccaggacgggcgattggtggtgatcgctttatgaaccgtgaaaaacagttacctgaagaagcagggcgtcaatggtttgaagcagatgtcaattatcaatgtggacatcgtggtagcgatcgcctgctatattctaatgatggattaatttatttaaccaccgatcattaccgtaccatgcaaagagttgcaccttaatgaaacagattatttttgatttcagcacattggcggatcgagatgctttttatcatcagtttgctcagcaatttcaattggatgaagcatttggtaataatcttgatgcgttatgggatgtattaacaggagaaattgaattgcctgttaatattgttttcagacatgcaccgcatcattcccgcaccttccagcccattattgagataatgcaagaagcgcaagagacgctcggtaaagacctatttcgctttcattgtgaacataaaaaagccaagtagagctagctgaaagcccataagtattacaaggtatcctgaaaaccgcagtggtatcatgatttagcactgcgttttcaggagcatcagtcgttaagctgactctgagagatcttttagatattgaaacaataagcggaatgattttggcggtttattggcttctttctcttttttagcattacgaataagtgtgcgtaattgctggcgatcggccataggataaagcgctaccacttcctcaatcacttcattaccaccgtcaatcagacgtgtacgcagatcttctagtttatgtaacactaaaatttgctgattatggcgattttttagtttatctagtgcttggcggatcggctcttcatcaacattacggagtaacttaccgatatattgaatttggcgacgacgcgcttcgcgttgtaccttttgcgccaatttaattgaagcgagtagtttttcatcaagaggaacacgttcaagctcttgagcacttaactcaacaagttcggtgcctaatttctttaacgcttcagcatcacgtttaatttcacttttgctgacccaaatgatctcttcctcttcttcctcttctaacggtgtattgtcaaattcaggattgaggtagtgccactcttctggctgctttgccataataaaaattcctgttgcagagtaagccgggagtgtgatttggtgaatgaccaaaagcccgacgggtgataacattcatatatcttctattgtaactgggaaaatcgcttgttgaccacctgtcaattgatttactttagcaaaaataagtaaaaagtgatgttctccttaggaaaatggttctcaatgaataatacagatcaggtaaaacagctggaagaggcagtttctcttgcactggagatcgccgcaaaacagtgtgacggtgcagaagttgcaattaataaatcaacaggcataagcgttagtacacgctatggtgaagtagaaaatgttgaatttaatagtgatggtgcattagggatcaccgtctatcagcaacaacgtaaagggagtgcatcttctacagatttaagtcctgatgcgattaaacgtgcagtacaagcggcagtagatattgcgcgctacacttctgttgatccttatgcagggcctgctgataaagccctgttagccttcgatgccccttttcttgatctctaccacccaacagacataacagcagataaagcgattgagctggcgtctcgtgcggagcaagctgcattagacagtgatagccgtatcgtcaataccgaagggggaagctttaatagtcatagtggaactcgtgtctttggtaacagccttggtttattaaaaagctactcttcatctcgttattcaatgtcgagttgcgttatcgctcgtgagggtgaggatatggagcgcgattatgcctataccattagtcgccgttttgaggcattacaatctcctgaatgggtaggacaagagtgtgcacgccgtaccttatctcgtctagctccccgtaaattatccaccatgaaagcgcctgttctcttctcagcggaagtagcaacggggatcttcggtcatttagtggcagccatcagtggtagcatgatctaccgtgagtcatcttgtttgttagatagcttaggaaaacagattttccctcaatggttaaatattcaagagcgtccacatattgtgggaggattagcatcaacgccttttgatagtgaaggggtacgcacatcagatgcagatattattaaagatggggtactgcaagagtggctccttactagctattccgcaagaaaattagggttaaaaagcaatggacatgcggggggcattcataactggcgtatcccagggcaaggtctctcctttgatgagttgttaaaagagatgggcacagggcttgtggtcactgaattaatgggacaaggggttagcacggtgacgggtgattattcccgtggtgcgagcggtttctgggtcgaaaatggtgaaattcagtatccagtgagtgaagtgactattgccggtaacttgaaagagatgtgggcgaatattgccacaataggtgatgatattgaaacccgcagtaatattcagtgtggatcgctactattaccagaaatgagtatcgcaggtcagtagcaccttacctttaatctcagcccataagtgggctgagatatcgcgcttacttgtattttattacgttaataagataaaaaataacacgcgaaccttcagcattgcttaacggtgtaattcaccagcagcttcaggttggtagagaatttctaatactttgaccttagtttcaaggccattaggaagctgccaactgatctcatcattgatagctaaacctaatagtgcagcccccattggcgccatgactgataattcagtcgcactatcttttaatgaagcagggtaaactaaagtacgaatacgctcttcattattttttaagtccataaaacggactttgctgttcatggtgacgatgttagcagggatatcagctggtgtaacaatgtcagcacgatctaactcttcatttaaagcttctgcaattgggctgtctgcaaaggcaggttgctctagtaatgaatctaaacgttctgcatcaagttcattgatgataattgttggctttgtcataccacactccaatttgttccaatgcaaaacaacacccccacggattaggtgggggtgttgttaaactctatgtaagataataggcggttctgtagcaaaaagaaagaggcagtgatcacagtctctttctgggatttttgttaagaaatgctaatctattgtttttaattagaattaatcttcatcaaaccctgattcaaataatgcaataatcgcatcaatcgcttctttttcatcacagccactggcttctatatcgatgtgactgccttgttcggaatctaacatcaacatcgcaatcacactatctgcttgcgcctcaacgccttcatggttacgtaacgtcaccgttgattgaaatgtattgaccaaatcaaacaatttcatggcaggccttgcatgcatgcctaaacggttttttatcgctacgcgtcgatattgggtcatttgcgcttttcaagtgttctatggcgtgattgtacgtttttccctctagagcggaaatagtcagccagttgttcagccacgtaaacagaacgatgtttgccgccagtacaaccaatagcaacagttaggtaactacgattattcgtctctaacatcggtagccaaagttctagataacttcttgtttgataaataaagttatgcacttcggtatggcgatcgaggaaggctgcgactggacgatctaaccccgtcattgggcgtaatttgggatcccagtggggattaggtaaaaatcgtacatcaaagacataatcagcatcgataggaataccatgtttaaaaccgaaagactcaaataccatggtcaattcgcgttcacgtttaccgagtaagcgtgtacgtagcatttcggctaattcatgcacggacatctctgaggtatcaataatcaggtcagcccgtgatcgtaaaggttcgagcagatcactctctgtatcaatcgccatttctagcgagaggtttttcgttgaaagagggtgtaggcgtcgagtatcactataacggcggatcagcgtatttctatcagcatctaaaaataacagttgtggagaatattccgcgggtaaactttccagcgccttttcgaaaatctccggtgattctggcatattacgtacgtcaatactgactgcggcagcggcagcatcacgctcagccagtgttttcgcaagctccggtaacagatcgacaggtaagttatcaacacaataaaatcccatgtcctcaagcgcacgcaaagcgactgacttacctgaaccagagcgtccgctgactatcatcagcaccatgaggtagctccccttaatttcccagtgatgaatatcattccactgtatgctattcgcgtcctgataaacccaaacccattaggtttattctgtgataatctgataaagctcttcatcactttgtgcggagcgtagtcggcgacataaatttttgtcagccaactgttttgcaatcaaagacagtgtgtgtaaatgttccttacattgtgttgcaggaacgagtaatgcaaacaacaaatcgacaggttgattatcaatagcgtcgaaggcaataggctcgcttaggtgaagaaacacaccaacaactttttcagtttcatcactttcaatacgcccatgagggatagccaatccaccccctatccctgttgtaccgactttttcacgcgttaataaagcctcaaaaatcagtgtttctggtaaattcagtgcttgagctgcattctcactgataatttctaacgcgcgttttttacttgtgcaatgcacattgttatgtgtacatgccagagtaagtacgtcgctaatattcatctttgtatcgttgttcattgtcttattcacttagaccagcaaaccagatgccacagagtgacatctggtttttgttagcggattatttaggcgctgtttttaattgaacaaacgcgacatcaataacaccctaacatcgccgattgtattcccattttacaatgggaaatgaattaatgttgtctcagtttatctttgtgtttggttaattgacgagccagtttatccattaatccatcaattgctgcgtacatatcttctgcttccgcagaggcatgtaattcaccgccatttacttgaatcgtcgcttccgcaattttagtcactttttcgactttgaggataacttggacgttattaattttgtcaaagaactgaggtaatttagcgctttttgctttgacggtatcacgcagagcatcagttaattcaatattatgaccagtgatttgaagttccatagtgtcttccttctcaattatgctcaaaccaactctttacgttgatttgaaggcgggatggataatgactctctatatttcgcaacagttcgtcgagcaacctgtataccaagctcggcgagcatatttgccagtttactatcacttagtggtttcgctgggttttctgctgcgattagtttcttcactaaagcccgaattgctgttgaagaggcttcacctccgttatcagtatttacgtggcttgagaaaaaatacttcaattcgaaaattccccgaggacaatgcaaatatttttgcgttgtaacgcgagaaatggtggactcgtgcatctcaacctgttctgcaatatcggccaaaacaaggggtttcatatgctcttcaccgaattcgaaaaacgcctgctgtgtgtcaacaatgcaatgagcgacttttaataatgtctcattacggctttctaagctttttatcagccatttagcctcttgtaaattgtcacgaataaatttcccatcgctttcgttttgagctgattgcccaagcgctgcataagtctcatttatgcgtaggcggggaatgctatccgtatttaactcaacttgccagtgttctcctgatttttttaccagtacatcaggaataacatactgtgattcctctgtatcaatacttaaacccggttttggatcaagagattgaatggtctcaatcactacttttaatgtctcttcacgtagcttagtgtgacgcattaattggcgaaaatcacgattacctaataacgctaaatagtgctcaataacaagttgagtctctttcaaataaggtgtattagttggaaatgtcgacaattgaattaacagacactcttttaagtctctggcagcgacacctacgggatcaaagcgttgaatacgctttaataccgcttcaatctcatcaagctctaactcatcatcacccattccggcaagaatgtcatctgttgaaactgttaaatatcctgtttcatcgacagcatcaataatgcttgtcgcgatagcacgatcagtatcagtaaaaggtgttaggtcagcttgccaagttaggtaatcttgcagtgaagccgtggtttcaccttgatagagtggtaattcatcagccgcataatcattactggtgcctgaaggggtgcctgcggtgtaaatttcttcccattgggtatcgagaggaagatcgtcaggcatctccttttgctctagtgcatctagggtatctaacacctcattatcacgctcattgtctggtgtactatcatcactctcttgtgttgatgagctatcagaatgcgttacatccgcttgatcgtcttcttgttcaagcaatgggttagattcaagggcttgttgaatttcttgttgtaattcaagcgtagaaagttgcaacaaacgaatagcctgttggagctgtggcgtcatggccaattgctgactaagacgaagttgcagactttgtttcatagtgatgcgatggatcctcttatgttgtcatccgtgacgaaataaaagtgtcactcagatcacaggcggaagccttcacctaagtaaacacgtttaacttgctcatttgccaaaatttcttctggtgaaccatgggcaataaggtgtccttgactgacgatataagcacgttcacacacatctaaggtttcgcgtacattatggtcggtaattaatacgcccaagccataatcgcgtagatgttggataattttcttaatatctaaaacggaaatagggtcaacaccggcaaaaggctcatccaataaaataaatttaggatttgccgctagcgcccgtgctatctctacacgacggcgttcaccccctgataaagattgccctaaactattacgtaagtgactgacattaaactcttcaagtagctcttctgcacgatcttttcgttgttcggccgttaaatcatggcgtatttctaaaattcccatgatattgtcataaacgcttaagcgtctaaaaatagaggcttcttgtggcaaataaccaatacccttacgcgcacgctcatgtaacgggagtaaggtaatatcttcatcgtcgatagtaatgctacccgcatcacgggcgacaatacctaccaccatataaaaggtggtggttttccccgcaccgttagggccaagtaagccaacaatctcaccggagttaacattgaggctcacatcaccgacaacggtgcgccctttgtatgcttttgctaaattttcagcttttaacagcgccataaagtgttacttacctttgttgttaacaccgggacctttctcttgtaactgagaagggagtaaaacggtggtgacttgttttcccttaccgctaaatgcttccatttgttgtgtcggtacgagataagtgattttatcaccggtgatattactgtctaattgttcaagataagctttacctgttaaggtcaccagctctttgtccatctcataggtcattttatcaccacgacctttgattggtttaccatcatcttgtaactgatagaatgtcacagggttaccaaaagcttcaatcacgatttttttagaatcgccaccaggacgtgtaaccactactttatcagctcttatatcaatagagccttgttttaccacaacattttgtgtgaaagtggtaatgtttttttctaaattaagtgactgtttctcggaattaacaacaataggttgttgtgtatcatctttaagtgccataactgggacacttattgagaataacgtactgataattagtgtattacggatttttcgattcattagggatctcataataggtgttcacctgttcaatcagctctgcacgtttttcacgcagattgcctcgcatttttaagccgactgatttcagtccgacgccgataatagtcacttcatcatcagaggaaacatcttgtgtatccagatctgcgatagcattttctgtgttgatccgctgaagttgggagtcatcagttaaactatcaatttgaacgtcgccataaagatagagcattttactgtttgtcagtttggctttatttgcacgcactgtccatgttgcatctcctgtcggcgaataagtcgttaagacaggattagtaaaccatgtaaacttttgctgagcatagtttttgacatcatcagcaactagtttatatcccagtatacctgttggttcataaacaaaggatattgatgatttagattggtaggtgggttgaccatcttcaacaatctttccatcatcaagctcagtattgttagtatagttccagccaatcagcccaagagcaataatggctaaaatcagggtaaaccaggattttaatttattcattctgtgtcgttatacgtttaaatcgataaacctttagcttcttcaagtcgaccttgggctaataggatcaaatcacataattctcgtactgcaccgcgtccacctaaaatatgggtaacatagtcggcacgaggtgtgagtaatggatgggcatcagcaacggcaactgacagtcctactttttccattaccggtaaatcaatcagatcatcgccaatataggctgtctgttctggtttaaggtttagtgtatctaacagttgttgatacgccaaaagcttattatgctgtccttggtaaagatatgtaatgccaagtgttttggctctatcttctaaaagcttagattgacgacccgtaatgatagcgacctcaatacccgatgtaagtaaacaacgaatgccatagccatcacggacattaaacgctttcaactcttcaccgttattgcccatataaataagtccgtcagacatcacaccatcaacatcgcaaatcagcaattggactttttctgctttttgcattatttgcttgcttactgcaccgtagcaggtctctatcattgtattcatctttatccttatgaacgcataacaagcttaaacaaccccagcttgcaataaatcgtgcatatgtaaaacacctaataaaatatcactatctggttcagtgactaacagtgaagtgatatgttttgcttgcattaaattaagcgcttctaccgctaagctatctggggaaatgcgaattccgcctttcgtcattacatctgatattttggcattattaagatcaatacctaaatcaaagatacgacgcaaatcaccatcagtaaaaataccgttaatcaacatattatcatcacagataacggtcatacctaattttttacgggtgatctctaccagtgcttcgcgtaatgtcgcttctttgttaacgcgtggaatatcatcctctttattcattaaatcactgacatgaagcaataatttgcgccccaatgcaccaccgggatgcgatagtgcaaagtcttccgccgtaaaacctcgagcgcgcaataaagcgatagctaaggcatctcccatcaccagtgttgccgttgtgctggtggtaggggctaagcctaacggacaagcttctttagggacttttatacaaagatgaatatcagcagctttccccattgtactttgaggtgagcgtgtcatacaaattaaaaggatctgtttacgcttgaggacagggataagggcgagaatttcactggcttcacctgaatttgaaattgccagcacaatgtctttttctgtcaccatacctaaatcgccatgactggcttcaccggggtgaacaaaaaaagagggggtgccggtactggcaaaggtggcggcaattttatgcccaatatgacctgattttcccatgcccataacaatcactcttccctgacagtgaaagattttttcacaggcaagagaaaaatcgtcattgatatattgtgctaactcagctaatccttcttgttcaatttgaagaacctttttacctgcttgctgaaaatcaaatccggtcattttttgtaccatttattttaggttaagagagaatgtgcaacgcacaacaccgtaatataaacaataaaacaaactaataagaaaatcccctttccacggtttagccgctgtttgcgccccaatgaaaagagtgagaaaagtaggcccgcgaccaccagcacagtaaaactaaaatagaatgcttgcatattaaatgtgctaggagagagtaatgcgggcatgcctagcacaaaggtgagattaaaaatattagcgccaataatattgcctagagccagttcattttcacgtcttaaggctgccacaacggtcgttgctaattcaggtaaactggtgccaatagatagcaaggttagtccaactaaaaaaccgctgagatgatactgttgcatgatgataaaaacattatcaatgatcattcttgttgcaacagggattatcagtaatgcaattaccacccaaaatagggcaacagaattacgtggattagtttgtaattcaaaacgtgaaagtgtctctagcggtaacacatggcgcacttgtgttaaggttttatggagcatttttatcattagaaaaagagaggcgaagccgatgaaaaaaagtaaaccgccttctctcaaccctagatgaccattagaaaccaccagtcctgctaataagatgactataatcatcaaaggaagttctttttttagtaccgcagattggatattcatgggataaatcatcgctccaatcccagcaatcagtagcagattcgttaatgaagatcctattgctgtacctatcgctatctcgggtaaattgtggatggccgcgtcggttgcaacaaaaagctccggcaatgaagtgcccattcccacaataacaataccgataacggcaggagggagctttaatgattgagcaaacacacttgcaccatacaccagtcggtctgatgcatagactaataacatcaacccaacaatgagaagagacaaagtaatcaacatgccatcagttttccaacaatgagtgaaaaataaagaaaaaaccaataagacagggctgataaaaaacattattgtcaaaaggttttgctaattcaccatattttgactagccaagcacgaaaagtaaaatcaaccgtgcaataaattgctaaatagtggtgatttctttgtaacattgacaatgacctgccaaaatagcgtataaattttgtttatgcagacaggcttaaggacgttttattcatgaacgcacaaccagacaatttaattgaagtgcgcaatatgaactttactcgcggtagcagaaagattttttcgcaaatcaatctggatgtgcctagaggaaaagtgactgcaataatggggccttcagggataggtaaaaccaccttattacgcttgatggggggacaaattctgcctgatagtggtgatatttggtttgatggtgacaatattcctaagttatcacgctctgctttatatcagtcaagaaaaaaaatgagtatgctttttcaatcaggcgccctttttactgatatgaatgtatttgaaaatgtcgccttcccattaagagagcatactaatttacccgaggcgttaattcacactaccgtgatgatgaagttagaagcggtagggttaagaggggctgctaatttaatgccatctgaattatcggggggaatggcgcgcagagccgctttagcaagagcgatagcccttgatccagatttaatcatgtttgacgagccattcgttggacaagatcccattaccatgggggtattagtaaaactgattgatgaattaaaccatgcattaggggtcacttgtgtggtggtgtctcatgatgtccctgaagtactgagtattgccgattatgcatatattattgcagaacagaaaatcattgctcagggaagtgcaaaagagctacaggaaaatccagacagacaagtaagacagtttttagatggtattgctgatggacctgtacctttccgttttcctgcggggaactatcaggatgatctattaggacgaggtaattagtacgtggttaatttactagcgcggttaggcgcgcgatcactgtcgatttttgcgacttttggtagagccggcatcatgctatttcgagcattgatcggtaagcctgagtttcgtaagcagtggccattattaatgaagcaactgtacagtgttggtgttcagtcgctactgatcattatggtttctggactttttattggcatggttcttggtttacagggctatctagtactgacgacatttagtgcggaagcgagcctaggtatgatggtggcgctttctttgttacgagagttaggccctgtggtgacagcactattatttgctggacgtgcaggctctgcactgaccgcagaaataggtttaatgaaagcaacagagcagatatccagtttagaaatgatggctgtcgatcctcttagacgtgtggttgcgccacgtttttgggccgggtttattagtatgccattgctttcactgatctttgttgcggtggggatctgggggggtgctattgtcggcgtggattggaaaggcattgatgaaggctttttctgggcatcaatgcaaggtgcggttgaatggcaaaaagacttagtgaattgttttattaagagtgtcgtgtttgccattaccgtgacttggatagcgctgtttaacggatatgacgcaatcccaacatcggaagggattagcagagcaacaacgcgtaccgttgttcattcatcgttagccgtattaggtttagattttgtgctaactgcactgatgtttgggaattaagtcatgcaaagtaaaaaaattgaagtttgggttggtttatttgttgttattgcactgatagcggttgtctttttaagcttaaaagtggctgatattaaagaggtgggtaatcaacctacttatcgtgtctacgcaagttttggtaatattggtggtttaaaagagcgttcaccggttaaaatcggtggggtggttattggtcgcgttgcctctattaccttaaaagaagagatggaaggtaactatcgtcctgaagttgctctcgatattttaaacatttatgaccatattcctgacagcagttctctttctattcgcacatcaggtttattaggtgaacagtttttggccttaaatcttggcttttatgatgaagatttaggttctgattttctaaaggatggtggcagaattaccaatacccattcagccatggtgcttgaagatttgattggtcagttcctttataaaaccggtgacggagatggaaaaacaacctctgactcaaaaacgcaaaccgaacaaccagcattaccttaatgatcattcgcttacggtgtggtttatttagtgcaccgtatttactgaaatataatcccaagaggaagcgagtatgtttaaacgcttattaatggtcgcattattggtgataacaccttttgcgatggcggtcgataaaaccaatccttatgctttgatggaagatgccgcgcaaaaaacctttgataaattaaaaaccgagcaaccagaaatccgtaaaaatccagaactgttacgtgagattgttcaacaagagttgttaccttatgtacatatcaaatatgccggagcattagtgttagggccttattatcgtaatgcaacgccggctcagcgtgatgcttactttgccgcttttaaagattatcttgcacaagtatatggtcaagcattagcaatgtatgaagggcaagaatatcgcatagaacccgctaaaccttttgcggataaatcaaacttgactattcgtgtcactattattgataaaaatggtcgaccaccagtacgccttgattttcaatggcgcaagaacagtaaaacgggtgaatggcaagcctatgatatgattgccgaaggcgttagcatgatcaccaccaaacaaaatgagtggtctgatattttaagtgcgaaaggggttgatggtttaactaagcaattagaaattagtgccaaaacaccgattacattagatgagaaaaaatagtatgtcagcttcgttaaattggcaaaaagagggtgaaatactctcttttcaaggaacgctagatagagaaacgttattgccagtttggcaacaacgtaaagcgttattagctgatattaatatcatcgatatttctcaacttgatcatattgactcaaccggattagcactttttgtccatctaaaggccgaaatggaagcacttgagcgtcaatgtgttattcaaggtgttagtgagcgctttcaaacgctaatcacactctatgatcttgatgaaattatgaatattgcttaatgcttttcccgataaagcaataaaaaaatcccccttattgatacttttatcattaagggggtttttcatggtttaagagtaggccggattctattaggataggcaactgattattattttaacgttgagattgagcaattatggatacaaatgaaatcaaacaagtattaatggataccctatctttagatgaagtcattgttaatggtgatggcagtcattttcaggttgtggttgttggcgcgatgtttgaaggaatgagcagagtgaaacaacaacaaaccatttatgcccctttgatggaatatatcgcagataatcgtattcacgctttatctattaaagcctacacacctgaagagtggaaaagggatcgtaaactcagcgggctttaattcagtaggtatacagcgtacagcaaaataaaaaagagagttctacagatggataaatttagagtacaagggcctacctgcttatccggtgaggtcactatttcaggcgcaaaaaatgctgcactaccaattctgttcgctgctatccttgccgaagagccagtagaattaaccaatgttcctaagctaaaagatattgataccaccattaagttacttaatcgtttaggtactaaagtcgaacgcaacggctctgtttttgttgatgctcgtcatatcaacgaattttgtgccccctatgaattagttaaaacgatgcgtgcctctatttgggcattagggccattagttgcacgtttcggacgtggtcaggtttctttgccgggtggttgtgcgattggtgcgcgcccagttgatctgcatattacaggtttagagcagcttggtgcggaaattacgctggatgaaggttatgtgaaagcgcgtgttgatggtcgcttaaaaggggcacatattgtaatggataaagtgagcgtaggtgccactattaccattatgactgccgctgttttagcagaaggtaaaaccattattgaaaacgcggcgagagagccagaaattgaagataccgcgaattttcttaataccttaggcgcaaaaatcagtggtgcaggcaccgatagcattactattgaaggggtcgaacgccttggtggtggaacctatcaaattttaccagaccgcattgaaacagggacattcttagtcgcggcggcggtttctcgtggtcgtgttgtttgtcgcaatgctaaaccagatacgcttgatgcggtattagctaaattacgtgaagcgggtgctgatattgaaacgggcgaagactggataagccttgatatgcatggtaaacgtcctaaagcggtcactctgcgtacggcaccacatcctggttttccaaccgatatgcaagctcagtttagtcttttaaatcttgtggctgatggagcaggaatgatcactgaaacgatttttgaaaatcgttttatgcatattcctgaacttatccgtatgggggctcatgctgaaatcgaaagcaatactgtactttgtcatggtgttgataagctttcaggcgctcaagtgatggctaccgatttacgtgcttctgccagcttagtattagccggttgcattgctgaaggtacgacgattgttgatcgtatctatcatatcgaccgtggctatgaaaatattgaagccaaattacagggtttaggggctaaaatcgaacgtctacattctaatgactaattaagtttagttaccctgttatcgtgattaaaaaccatagcactttattggtgctatggttttttattattcatcaagcgtatttatagatttttcactaagttaacagcatcttggttattaatgtttttgcttacatagttttttagcatgactctatttgatacaataagcgaaaaccacttactttcccatgctttataggcgtgccaagaatatcctatagaatagtctttactcatatgattcatcgaatgaaataccgctttaagatatattttttctaaggatgtatcttttatttcgataattgttgcaagataaattagccaatttgctaaatgaacatattgttcccatgcactattttcgctcgttagttttattttttcctgtattattttttctatcatattcattgccttggcatctgtcacaagaacaccaaatgcagctaaggacataattatttcataaaaattattttcaaccttgagaaaacttttagaaaagctgtgttttccactcagtactttttcgatattctctaacgaatcttctactcttttttgtacatcttgaatttttgaatttaatttatcaaaaaagtcatgaatatctaaattatcaatgactctaatgccataacaatgaaaataatactcttttaaataagattctactttctttctcgatactaaaaacatagaggaaccaataacattttctcgtgagaaatttttgtactcattaataattgctttaagattagtgtctccaagagaatagcctaatataacgattgtattttcataaatcatggagcttattttcttagaaaaataagagttatagtttataaatttaaaataatcatcagaagtaactaccatattactaggcgaatcaatagaaccatgaacatgataaatttttgtactggaagatgcttttggtattggtaaaccaggtgcaagagattgacatttttttattgggatcatttcttcgataagtttatcataatttgttgttattattcttattgaattattatctaagaaattctttacatgcttattatcttttgataaatgaatttcttttattatttctgctatcttttcatgtaaattttctccttttttttgatattcaatataaataacttgagccgcttcttctaagcttaatggattttttccatcttcgggaaaaagtgattttttgactttatttaaaccatctaatttatcacaggctttttcaagtaaagattgccagccaagagctttgttattcgttagtgctttagaaaaaccggttcctgtaaacaaacataatctatttgctgccgctgaataggctatttcatatatttcattcactttttttaccccatgttttgtaatataagtatgttaagtcatctaatttgaaattgataaaatcaccattattcatttttacaggtggtaattcactaaatataaataaataaagaggttttggcggtgttgatagtgctattttatctaattcttgccgagaggttcttttatactctgatttatttacaagacgttcagaaataaaaaatgttggcttgcaaattaagtcaccttttttcatttttttatcaaaacggacaaggtaataattatctatacgtttaatccaagctttaccgaagtatattcgaggttcatctacatattcgcttagatcttttttatcattaatataaatgaagaaatctcttaaatggatctttccttctgcaatattgagaaagaaattttttttatcgataaaatcattaacgagtcctgataaacgcttttttgaatgacgtgttttattactattttcgtcatcaatattttttgtttttaagcgtttgttgatgccattttcctcttttgatgaagggatatcatgaaatttagttttataaggtgttgagaaatcaagctcaacaatatcatcgagaataaaaggaagagcctctggatcttctttcattttttttattctacgaaattcattttcttcattgatccctattttacatgtatcactatgttcagaaacaaatttaaaatgaggaactctttttcgtaatcggtttggtttatcaagattggcacaagttacttgggcatgacaatcaggttcagtacattcaaaaagatattttgatgttattattttttttgaaaataaattatcagcttcttctgctgtaatatttctatttaattcaaggcttttggctaattctattttcattgaaaatctcttttacgtattatttttatatttattttgtattttattaaatgataaatatcatatgcttttttgaatttctgcttaatggataaaaaatgtgcgctgtgtaatgataaataactatttaggattattcacctatcagttaagtaaaaaaattaatatatattattttttattataacgtggtatatccatcattctaaatgaaattaataaaataatacctatggtaattctttgatagcaggatacagtaaagaaagtcagcctgtgttaggtcattctttattaaccgcttaccaataaaaaaggaaaaaacgctatgcaggtcacaaggaaacaagagcgtgttattcgtcaagcacttgatcattggcaacaatctggcgagctatcagcacaacagcatcaacaactagaaagtacattacaacgccttccctttgattggaaaagattgagtcgctatgctttttggatagctattgtctgcttaattattgctgccattaacctttttagtgatactgcgttaattcattatcttatcgaattatttagtgtctctgagattatgcgtgtggtatttcctgcacttattgctggtatgttttatttttggggctttaaacgccaacgcaaagaaatactatggcattacagtactgagtttattctctttttagggatattatttacggcggtttttctttggcaactcggtgagttgttagatgatggtagtggtaatattgcgccacttcttttaatgggttgcattatttatgctgtgattggttttatcagtcgctcttcattagtgtggttatttttcttattaatgttgggcaattggtttggtgcaaaaacgggttatatgtccggttggggcgcttattggctaggcatgaattatcctattcgcttcgtgttatttggctctgcattattagcgggatgctattttttgcaaaatattttaatgcgccgtcgcttattttttatgacaaagataatgggactgtcttatctctttattgcgttgtggatcatgtctatttttggtaattacgatccggatacgtggtattacatttcaagtgtgcagttattaccttgggctttattatttgctgttgttgctgtcatttgtatttatatcagtttaaaaaccgatgatggcatgttgagaggctttggactaacattccttggtatcaatctttatacccgcttttttgaatatttctggaatagcttacatagtgcaattttcttttttatcttggctatttcactgatttttattggacgtaaagcagaaaaaatttggcatgccattgaaaatagccgcatggtaaataagcaataatgtcgtgaataacaaggtaactcgcgaaagttagctatggctatgactctggctgatattctgaaattgtgacatcaacatttatttcattaccatcacgtaataaggttaccggtaaaacggtaccaggacgtgtttctgcaatatagtccatcatctccatagctgatttagccggagcatggtcgatacttaaaatgatatcgccaattttcattcccgctttatcagcaggactattgggcgtaatgcggaagatacgtaatccttggatctgtttaatatcggtatttgaagagcgaattttaggtagctctttcgcggtaattccaataaaaccacgaataactcgcccatcacggataagcttattcataatttttacggctaattgtgttggaatagcaaaaccaagtccttccgcactggggcgatagccattgtaggtgcctgaatcaaaggtcatggtattaatacccactaactcaccttcagtattaatcagtgccccccctgaattaccttcattaattgacgcatcggtttgaaggaagttttggtaacgtgttgggcttaagccgacacgtcctgtggcactaataataccttgtgtgatagtttgcccaatattaaatgggttaccaatggctaaaacgacgtcacccacatgagaaatacgcttactattgatggggatggtaggtaatttttctgcatcaacttttaatactgcaagatcggttaagggatctgagccaatcaataacccttcatagagatcaccattttgcaaagccacaataatttgatctgcattattaataacgtgctgattggtaagaatatagccccgcggatccataatcacccccgcacctagcgaggtcagctcgcgcccttcttgagaaaagcttcccattgtgctgctgtagacattaactaccgcaggtgccgcacggcgcacggctttgttatagctaaatggggcattaagaaaatcaccattaatcaggtgttcaataaagatagggcggatagaaggtaccgcaaccaaaagaatggcagctgttaaaacaccaatcaaggtagatcgcagtagcttgcttaacataaaaatcctgtatttatgtttgaataagaggatagcgtcgtaagtgtcatgagaatagcacagtttcgcttttgaaaggatatgtcagcgtagaaaatcgttttttagtgatatgaaatcaagaaaaaaaccctattaccgaagtaatagggctgaaaggaacaaataaattagatacaagtaagtggggtttaacgcgagctgttacgtaacagaagataaatttcttcgttgccacgtttaatgtttaatgcaagaaccggtggtttagcatcgatggttttacgtaagtcacctaaggagccaattggcatattgttgataccaataataaggtcgcctttttgtaaccccgatgctgctgccgctgagcctttctccacagaatctacagcaaccgctttaacttgtttgttaacatagttactgagcgttgccccttgaagtgcgggagagaagttatccgctcgcgttgcatctgctgattgtttctctagtgtaactttgacatccattggttttccttggcggatcaaaccaatcaggatctctttacctggtggtgttgtaccaacttttgctcttaattcagcaaagctattaatgcgtttaccatcaatagaaataaggacatcacctggttttataccggctttagctgcggaagagtccgccaatacttcactgacaaaagcaccgcgttgggcatcaattttaaaggatttcgctaaatcagcattcatttcagtgccgcgaatacctaaaataccgcgttttacttcaccatgtgtaatcagttgttggctgagatcacgcgccatattacttgggatcgcgaaaccaataccaatattgccaccacctggtgctaaaattgcggtattaataccgataagttcaccattgagattaactaaagcaccaccagagttaccacggttaattgatgcatcagtttgaataaagttttctaacccttccagatttaaaccactacgacctaaggctgaaataataccggaagtcgcggtttgacctaaaccaaatggattacccacagcaaccgcaaagtcaccaacacgtaatttatccgagtcagtcattttaatggcggttaagttattgggtttctcaatttgtagcagggcgatatctgtttgtggatcgctaccaattaatttggcgtcaaattcacggccatcattaatttggagttgaattttatcggctccatcaacaacgtgattattggttaatacataacctttttcagcatcaataatcacccctgaacctaagccttcaaaagggcggatgctttgttgttgtgaaggaaaatttggaccaaagaaaaatttaaactcttctggaacctgctggctttgtactcgagttccagaaacatgcacactgaccacagcgggcaagactttttctagcattggagccaagctaggtagttgttctccagatggcattaccgaaggcagggcggccatactggttgccgggagagtagagagtgataaaccaacactcatcgctaatgcgctaagtagtaattttctttttttagtcaacatgaatatgagtctcttgatcttgatattgttatcaaaaatatttattgctcaatatgagctcgatgttactaagacatatagaaataaaggaaagttcattggtaagctatcagcagggctttcttttacatggatttacaagacaatagctatctttaaaccttcccattgaatcattaactttttacaaaataatataaaataaacgccacaatagttgtggcgtttgtgtgttaatcatcttttttatcggtaggtctaaataatccagatgccccttcggaataatcccgtggcggcattttgatcggggattgatcattggctgcctctgattcacttaaccgataattaaatgggttatcttgaacaggcatgtctggcattaactcattggagctttttgccatgtgttgataaagttggcggtagtctttcgccatattgtccagtagttcagcacttcgagcaaagtggctgacaagctcgttgcgatatgtatcaagttcttcttttttagtatctaattctgcttttatagcatcttgttggcgcatggttttattaccataacgcattgccagtgcgccgataataagaccaacaactaatccaatcagtgcataaacccaaaccatggcaactccttttcatctaatagtgaggacgatggattcttataacatcataaccgctaaaaggcatgggtggaataatatccttaagcttaatatgaaaattcctgtgttacatcgatgttaaaacaattcttactgcttataatagaggcattcgcaaggtatttacttatgtcaaaattttaaggataagagagcatccatgaccgttagcacgccattatcactttatgaaaccgcgttacagcagggggattatcaacctgatgaggttcagcgacaaaccgttctccatctgcaacagttataccatgcattattaaaccggacatcaccagaaaaaagttctattactcagcggttgttaggaaagtttcgtgcgaaaaaaagcacaattgtccctgagcgtggtgtttatatgtggggaggggttgggcgaggtaaaacctggttgatggatatgttctatcaaagcttacccacagaacgaaaactgcgtctgcactttcaccgctttatgttacgggtgcaagatgaattaaaaggcttacaagggcaagaaaatccactggatatcattgctgacggctttaaagcgcaaaccgatgtactctgttttgatgagttctttgtttcagatattactgatgcgatgattttaggaacattacttgaagcgttatttgccagaggtattactttagtggcgacatctaatattccccctgatgatctctatcgcaatggactacaacgcgcacgttttttacctgctatagaacaaataaaaagccattgtgaaattttgaatgttgatgcggggattgattatcgcttaagaacattaactcaagcccatctatttttatctccattaacagagcataaccgccagcaaatggataaaatttttactcagcttgccagcagtagtgaagttgtattcgcgcccacattaaccattaatcatcgtccaatggtaatgagaaaagtggctaatggtgtactggcggttaactttgatacgttatgtgtacaagcgcggagtcaacttgattatattgaattatcaaagcactatcacactgtgttgctttatgaaatggtgcagatggggagtagaaatgaagatgttgcccgtcgtttcttagcattggttgatgagttctatgagcgtaaggtgaaactaattattaatgctgatgttgagatgagcgagatttatcaagggcaatttttacgttttgaataccaacgttgtttatcgcgtttgcaagaaatgcaaagtgaagagtatctttcacagcctcatctcgcttaattgttaaagaaactctgttttgattatggtaggatggcgctcattgtaacgcttgatgctattgattgttataaaaatggcaaaacggtacttattaagtgattacaatcgctttggcaagggagaatgcttctcttcaggtggtaatagttgatgacagagatggcgagtaggctaacaaaaatagcgccataaggtattttttgctgaaatattgaaaaagaatccaattgtttttcaattatgactcgatttttttttctgacttctctataatcttgcgaccccacgttgcagcaagttttttatttcccaaaaaactcgcattttagagtcagcagtgctactcgaaggggtaggtttgctggacacaagagtcgtgtgaacctcaatagcatttgaaccgagtgttcaccaacgtgtaactaaacattgggtaattttcaataatgaaaacttttacagctaaaccagaaaccgtaaaacgcgactggtatgttgttgatgcagacggcaaaactttaggtcgtttagcaactgaaatcgcacgccgtttacgcggtaaacataaagcggaatacactccgcacgttgatactggtgactacatcatcgttttaaacgctgagaaagtagcggtaactggtcataaacgtactgacaaagtttactaccgtcatactggtcacgtaggtggtatcaagcaagcgactttcgaagagatgatcgcccgtagtcctgagcgtgtaatcgaaatcgcggtaaaaggcatgctgccaaaagggcctctgggtcgtgctatgtaccgtaaactgaaagtttacgcaggcgctgagcacaaccacgcggcacaacaaccgcaagttctggacatttaatcgggataataggcaatggctgataatcaatactacggcacaggtcgccgcaaaagttcttccgcacgtgtcttcattaagccaggtagcggtaatatcgtaatcaacaaacgtagccttgaagtttacttcggccgcgaaacagcacgtatggttgttcgtcaaccgctggaattagttgatatgcttggtaaactggatttatatatcactgttaaaggtggtggtatctctggtcaagcaggtgcgattcgtcacggtatcactcgtgcactgatggagtacgatgagactctacgttctgatctgcgtaaagctggtttcgttacccgtgatgcgcgttctgttgaacgtaaaaaagtgggtctgcgcaaagcacgtcgtcgtccacagttctcaaaacgttaatttgttatcttttagatatcaatttgatgttgaaaaacccgtctttacaggcgggtttttttatttttaaaattgttttgaaaatgtggggttgtggccaaaaaaagcatggattaaaagcagatcaaaaatacgtttttttagagtttaatccttagtatctcttttttatgatattataaacttagtttttgtgtatattagcagattgaattgaattattcgcattgttcaccctaagtgacatgaaatctgatagaatagcctgctttagtgtctttctttcgacgatttcttaatgctgcatgctgcctatggccattttactgaggttaatgtccataaagaatttgacagtcataccaaaactattatgacaaattgatattgtgattgttttggtattgcttgattatgatatgtgccgcaaagacaaacggttttttgaacctgtaaaatacaattatcttaggataagactattatgcaggtgctactcaatgtcgtactcaatgaagttaagttatttataactttttaagttaacggcatgagtctgtttgtcttgtaggaatgggggaatggaagatgcataagcatgtttgttcctttaattgattaacttggaggttttcatggctgtcgctgccaacaaacgttcggtaatgactttgttttccggtccgactgatattttcagccatcaggtcagaattgtccttgcggagaaaggtgtcagtgttgaaattgaacaggttgaagctggtaatcttccacaagatcttatcgatcttaacccgtaccagagtgtgccgactttggtcgatcgtgaactgactttatatgattcacgtattattatggaatatcttgatgaacgcttccctcatcctcctttgatgccagtgtatcctgttgctcgtggtagtagccgtttaatgatgcatcgcattgaacaagattggtactctttaatgaatgttattgaaaagggtaacgatcaacaagctaatgcagcacgtaaacaactcgccgaagagctattggcggtatctccggtatttaaagaatacccttattttatgagtgaagagtttagcttagtggattgctacctagctcctctcttatggcgtttacctgtattaggcgtggatttaagcggtgcaggtgcgaaagatgtacaaatttatatgcaacgtgtttttgagcgggattctttccttgcgtcattaaccgaagcagagcgcgaaatgcgtttaccttcaagaggataatagagcatggagattaaggatatgtctccgcgccgtccgcatttattgcgtgcgcattatgattggatccttgaaaacgagttaaccccccacttagtggtagatgttaatgtcgtgggtgttcaagtccctatggaatatgcgcacgatggtcaaatcgtactaaatatttctccttttgcggtaagtcatcttgaattgatgccgcatcaggtactatttagtgcaagctttggtggtgtacctcgtaaagtgcgcgtacctatggcggctgtaatagcaatatatgcgcgagaaaatggtgcgggtatgatgtttgagccagagccagcctatgaggaaggttatacaccatcattgatggatgatgagcagcaagacggcagttcagcttcggccactgaaggactgtctttagtgaaagatgagacacaggctgaaaacccatcttctccagatgatgatcctgagcctcctcgtccaacaggtcgcccatcattgcgtgtagtgaaataaataacgtttttattttcattgcataaagcccagttaaatactgggctttttttatatctatttgatttttcaattaacgctatttttgcactagcaaactaatagccgtaaataaatattgaccaatctcaggtgtcatccatgtacctttagcgatttcatgatcagtttgataaatggtacggatcttggcctgaatatcactatcaccctgtgtaaactgattgaacatatttagccacatcttagcgaggttttgcacctgctctgaatctgctttttctccgcaagtgagtgcattatataatccagaaataagctcaggccagacactgccagcatcaaaatagtgctgatgtactacggcaaattgttccggagtcagatgaggtttaaaaacagataattgatattcgctaaagcctttagcaacaaaatctatcatctgtttagtaataccggtagccgtcgcaaacttatcatcagaaatatgcattttatttaaacggacaaaaaagtcgggatttcccccagtatcttgctctaaagctatcatccactctcttgaaacttgcatggcttcatttgaatcggcagatttaccttgtttaatcaaattattgacagttgaaatacgctgttgccatgcttggctttttaatgtgtgcgcagtatagaggggtaactgcgctaattcagaataagtaaaatatttatcgtacatagacatcatctccaataaagaaaaccagtcatgttgcgtaaatggagtgcctgtttgtatttgttgttgaacatgctctagctgataacgcaatttggcaatttgttgcatttgcgtggttaattggctaatgcgctcttcaattaaacaagctatctctgcactatgaccattaagaatatgaccgatgtctttcagtttgacgccaatttgacgtagcatttgaatttgcgttaatcgctctatgcttttcatatcatagagtcgataacctgcatcggttcttgcagtcggttgcaataaacctatctcttcataatgatggagagtacggaccgttaatcccgtctttttagcgatctctcctacttgaaatagcatatcttcacctcctgtatgtcatgcaggttaaaacctcacgtaacgtaagggtcaataggttaatttaaatttttttgtacgataaaacagcataaaaaaacgccctatagtgatatagagcgttttaatcagtcaattaaataaaagagattatttcagtaattcttctaaacaacccgtataaagatttaccgcagtcatcagttgttgttcatcaaaatcaaagcctgcttggtgatgtccggcagttctatcggcaccaacaataaagtaaagagatttaccaccacagcgttgtactcgttttgctaacaccgttgcatcttcacttccgccgaatggacgggttgggatcgcagtgagttctgggtgtttacccaccactttggccatcacatcaatcagttcttggtcattggttaaatcaaccgcttcccccatcacttcgctttccatttctaattggaagctatgtgcggcaccttctgccatacgtacagcattggcagccataaagctattgatctcttcattctcaccacgcacttcgatttgcatttcggcattggcaggagtgacgttacgaccttcaccagcttttaataccccaatattaatacgagacatccccttaccatggcgagagatccccagcatttgtgttgcggcatggcaagcgcctgctaatgcgttacgacctagctctggctctgcccccgcatgagaaggcgtacctttaaaacggaaatcatatttagtggtacataaaaaatgagttgggttaagaacgatttcaccactattggcgataaagcctaagtgtgagcctaagaagtaatttgcatcatcagcaatgccactttccgccattgctcttgcaccacgaacgccttcttctgcgggttggaataaaatttttactttaccgctcactttatctttattgtcgactaaccagtgagcaacccctaaaccaatagtaatatgaccatcatgaccacaagcatgcatttcgcctggatgacaagaggcgaaattttctacctgtggacgatgttgagtctctgttgtttctgttaccccaacacagtcaatatcaaaacgtagtgcaacagtaggccctggtttgccactatcgaaaatagcgacacaacccgtaagctcttgcatttcatcaagcagtgcttcgtcaacatggtgttttcttgctaccgccaatcctttttcaaccacttgacgacggcgtccaaaagcaaagtcttggttaataacttcagggccgactttaacttctaatcctaagccacgtagcactttgacgattttggcagtagttaaaaattcagaccagccaatttcagggtattggtgaaattcgcgacgccatttaattaattgttctagtgaaactgacataatcatttctccacttataacatgaataacgcaacagcgatgacgccgataatcatacccggtgcagtacgttttgcgatttccatagggttgatattggcaagaccagcacaaacaatggctgcccctgctaatggtgacattgtacgacctaatgcgcctgataatgctgctgccatacccatgtcaggaatttcataaccaaattgtgcagcgtgtggtgtgacggtttcgttgaaagcaaatgctgcagcatcaccagagccagtaataatccccattaagaatggccctaatgtaccaccccaacgggcaaattcaggtgagtgagttaagaagttgataaaggcatcaatcagacctgatgcttttagaccggctgcaaatacggctgctgcgataatgatccccagcacatccccataagcattacccatccctttaaagaactctttagtaatttgagccggattggttaatgtgatgatcagtgcataaatggcaccaattaacattgctgctggcacagatagtttaaaagtactaaatgtttcgaagaaaggcagtattaatagaattaatgggataaaaggcgcagttgcatataaataattagggcgtactgcttctggtgttgcttgagaagatgagttggcgacatctgtggctacagaagagactttaaactcttttttcactaaagcgacaacagcgagtgaaactgctgctattgctcctgccattaaactatatgggctatggcgagcgattaaatcgacgacttccatattggccatattcgctacaaaagcgttatgtgacataccagggcttaacatggaaccgatagtaccacataacaccgcaccacctgcgattgcggggtgaatacgtgccgcgattaataacggaataagcgttgcaccaacggccgctgcacatccggctgctgatgggatcgcaatattaataaaataagtgacgatcactgttgctggaataagaaagaaaccaagacgagtcaggacttttgataaaacatggactaagtgcatatcgcacttggtgtatttcatcacgtaggcaaaacccatacttgaacagatagcttgaattaatgatgatgaaaccatgcgatcactaaatgcagtgaaagcatcgagcggtgtcagacttaaaatacataacaataagccggcaccgatcaataccatacgggtttcatatttttttattagcaaatagaccgttacgataataacggctacggctataagttgcatcaccatggtgatcccctagttaattatgacaatgtgcttaatgaataaaataacccaatatcaataagttatatttttcggtaaagttatcaggtaattccattatgaagttgctaggctgacaatatttgattgttatcaagtttgcgcactgaaataaaatctatttttttagactgtgatgttattaacaattgcagtcaaataatgatggacaaaaattagcgtaaaagttaaataaaaatagataaagtaaaaattaggaaaataaattaaattaactatagagcatagatgttatttttatacaaaataaaacaactattttttgtagaaaggtgttggaggaaattattattaaacaataatgagaataattattaaaatagttgtttttaggaggggggattaatatttataatagttaaaaataaattaccccattttaataaaacagggtaatttataaataaaattgtattgttactattttagtattaaagataagtaatattgaatattgctatctttaacaagataaataacgcaagatcccttccgctgcttctcttccttgtgctatcgcggtgaccaccagatcggagcctcttacaatatcacctccagcaaacaccttaggattggtcgtttgcaaaggtaatagtggatcatcattaataataattctacccgatgatgcgtattgaatattattttcatctaaccacggatagtgtgcaggtttaaaaccaaatgcaagaataaccgcatctgcggataatatatgttcgctgccttctatatattttaattccccgttggtttgtgtttttattacacgaacaccgatgacgttattattagcatctacttcaatatcaaggggttggcgattaaataaaaattcgccaccttcttctttggcattttttacttcacgtttagagccgggcatattattttcatcgcgacgataaacacaagttactttagtggcaccttggcgaatagcggttcgtacacaatccatcgccgtatccccaccccctaacaccaccacgtgctttttattgaggtcgatataaggtgattggggatcttctgcataacccattaaatggcgagtattaccaattaaataaggtaaggcattataaacccccattgcgttctcatgggcaaaatgaccactcaaactttgataagtacccaagccaaggaaaacagcatcatattgctctatcagtgtttttagtgagatatctttgcctatttctgtattaagacaaaaggttattcccatttcgctaaataactcgcgtcgtcttaccatcagcgatttttcaagtttaaaagagggaataccgaaagtgagtaatccaccgatttcagggtgtttatcatagactacgggttttactccttggcggatcagcacatcagcacaagccaatcccgcagggcctgcaccaataatggcgacttttttatctgtcatggtgacttgagacagggaagggcgccagcccagcgcaaaggcggtatcattgatatagcgttctatattaccaatagtgaccgcaccaaattcatcatttaacgtacaagcgccttcgcataatcggtcttgtggacaaacacgaccacagatttccggtaagctattggtttgatgagaaagctctgctgcttctattattcgtccttcattggctaattttagccaattagggatatagttatgcactgggcatttccattcacaataaggattaccacagtctaaacagcgatcggcttgtgcagaggcttgctcagcagaaaatgcctcataaatctcgacaaactcaattttacgcacagctaacggctttttagtcggttcaacgcgatttaagtcgataaattgatacacattctgacccatcatttttctcctattgtgcctgaacgcgtaattcagcgactgaacggcgaggatgacctaataaggcatgaacatcactcgatttaggtttgactaatttaaagtgttgtgaccaatattcccattgagaaagtagtctttctccttgttgggagccagttagccgtacatgctctgcgatcataccgcgaagatgctctgccaaaatcgcataattagccacgggaagaagctcaatagaggcgttattgatccgttgtgatagtgtggtatcttcatctaacagataggcaaagccccccgtcatccctgcaccaaagttaatccctgttttaccaagaatacagacaataccgccggtcatatattcgcagccattatccccaaccccttcaatcaccgcaatggcgccagagtttctgactgcaaaacgttcacccgctaatccagatgcatacagttttccacctgttgcgccatataaacaggtatttcccataatcgtggtctgatgggctttaaaggcagaaccgactggcggtgaaataacaatgcgtccacccgccatgcctttcccgacataatcattggcatcacccactaaggttaattccaccccttgcgcattccagacgccaaaactttgaccagcagtacccgtaaagtgaagttttattggtgtagcagataaaccactttcaccataggttttggcaatgagcccggataacgtggctcccactgaacggtctgtgttacgaatggaaaaatagtgggtttggcttatcttttgttcgacgcccgtgatggtttgcgcaacaatacgttgatttaattctcctttatcataagtatcattgtgctcctgacaatagagcgctttacctgtaggagaggtagcggtttctaataatcctgtgagtgataatttttgctgcttactggttatcccctctaagcaagaaagcaaatccgttctgccgattaaatcggttattttccttacgccaagttgtgccataagttcacgggtttcttgggcaataaagcggaaatagttgataacgcgctcaggtaaaccatgaaaatgttggcgacgtagggtttcatcttgggttgcaacccccatagcgcaattatttaaatggcaaattcgcagatatttacagcctaacgccaccattggcccggtaccgaaaccaaaactttcagctcctaaaatggccgcttttataatatcaacccccgtttttaatccaccatcaacttgtaagcgcactttatgacgcagattgttggcaactaatgcttgttgcgcttctactagccctaattcccaagggctacctgcatatttaactgacgttaatgggctggcaccagtaccgccgtcataacctgcaatagtaattaagtctgcataagctttagcgactccggtggcgattgtaccaacgcccggctcagagaccagtttgacagaaataagcgcacggggattaatctgttttaaatcgaaaatcagttgtgctaaatcttcaatagagtagatatcatgatggggaggcggggaaatcagtgtgacgcccggtacggcataacgcagttgcgcaatatagggcgtaactttatcaccgggtaactggccaccttcaccgggttttgccccttgtgccactttgatttgtaatacatcggcactcattagataagacggcgtgacaccgaaacgacctgaagctatctgtttgatacgcgaaactttgttggtgttgtagcgtgccggatcttcaccaccttctccagagtttgaaaatccgcctaaggtattcattgcttgcgcaagggcttcatgggcttctttacttaatgcaccaattgacatcgccgcagtatcaaagcgtttaaacagttcactttctgcttcgacatcttcaattgcaataggggttgtgtcattgagagctaatagatcacgtaaggtggtaatagggcgttgttgcactaattgggaataatgttggtaatcagcatagtcaccactatttaccgctttttgcaacgcttgaaccacatcaggattataggcgtgatattctccttgatgggtatattttaataacccaccagcgtctagaggatagcgagttagccaagcacgtttggatagattaaataagtcttgttcaaaatcgctaaaatctgcaccgttaatacgattatcaaccccatcgaagcaacgtttaacgacattatcatgcaaccctacggcttcaaatagctgtgagcaacggtaagaggcaacggtggagatccccattttggacattatcttatacagacctttgttgatcccattgcgataattgagcatgacttgcgcataagtacccgacaatatttttttatcgactcgttgcgctaaggattcataagccaagtaagggtaaatagcggttgcgccaaaacctaatagtacagcgaagtggtggggatcacgggcgcttgcggtttcaacaataatattggcatcacagcgtaaattattatctaccaaggctttttgtaccgcgcctactgccataggcgcaggaataggtaatcgcgcttgagtgatatttctgtcggataaaaccagtaatactgcaccacgattaaccgcttgttgcgccgtttcacataagatgtgtagtgcggtttctaaattattttcagtcggttgataggtgatatctagcgtgatggatgaataataagggctttcttgattgagtaattgttgaaaatcactataaagcaaaatgggtgatttaaaactgaggcgatgggcttgtccttccgcttcactaaagacattcatttcgcgaccaatacaggttgctaaagacatcacatgcgcttctcttaatggatcaatcggcggattggtcacttgcgcaaatttttgtctaaaatagtcataaattaagcgtgggcgctgagaaagtacggcaaaaggcgtgtcatctcccatcgagccggtggcttcctgcccattttcagccagtacatgcaaaatcgtttccagctcttcttggctataagcgaactgtttttggtatgtcgccagtaagctatcatcaaaagcgcgctctcctgtcgcttgtggctcaggcaattgctcaaaagggatcaggcgtttaacgttacgctccaaccaaagtttatacgggtgtcgcctttttaaatcttcgtcagtttcagcagaatgtaaaatgcgaccttgataagtatctattaccattagttcgccagggccgacacgccctttttctagaacttcatcaggttgataatcccaaatgccaatttcagaagcacaggtaataatattatcggtcgtgataacatagcgagctggacgcaggccatttctatcgagtgtacaggctgcatagcgaccgtcagataacacgatccccgcaggtccatcccaaggctccatatgcatagagttaaaatcaaaaaaagcacgtagatcatcatccatttgtggattattttgccatgcgggtggcactaataggcgcatagcgcggacaatatccatccccccattaagaaagagttcgagcatattatccagtgagcttgagtctgagccactctcatttacaaaaggcgctgcagtttgtaaatcggggatcagcggcgtatgaaatttataggctcttgctcttgcccattgacgatttccggtaatggtattgatttcaccattatgggcaagatagcgaaagggctgcgcaagcggccattttggggtggtattggtggaaaaacgttgatgaaaaagacagatggacgattccatccgtaaatccgctaagtcagtaaaaaagcgaggcaaatcaattgccatgcacagccctttatagacagtcactaaattagagaggctacaaatataaaaatcattatcggtaatacgtttttcaattcggcgacgagcgacaaataagcggcgctcaatatcattaatacgccatccggcaggtgcattgacaaaaatttgttctattgacggtaaagaagagagggcgatactgcctaaaatatctgtgttagttggtactttacgccagccaacgatagagagtgtttctcgttgcaattcttcttcaacaatttgacggcactgtgcagcgatagcattatcttggcttagaaacagcatgcctactgcgtaattgttcgctaaatgccagccattttcttcggcaattaactgaaaaaagcgcgttggtttttgtaataataacccacaaccatcgccggtttttccatcagaaaggatcgcgccacgatgttgcatacgggcaaggccatggatcgcatttctgacaattttatggctggctttcccctcaatatgggctattaacccaaaaccacaattctctttttccgctgttttttgatagagcatagtttgcttcctactcagtttatgggcacctcaagaacgagcgcaaaaggaacgattttgtctcaagggtgtaggtaaatttatgggtgctcatcgggtgatggtgtctttagctttgctatctcggttttttattttgctaagctactagtcaaattatcgataaataaaaaacaggtcaatcagcaaggatatttgactatagccagcgtgatgcgtgttttttttctttaattatttgataaataaaaatattatttgaaaattatttcattggttatgggatggtgagtgtgagctatctcactttttttacggggttctgctttattgcattctttgatgttagataatgccagtgaatttatcttaattattaatctattttagtattttattgtttttatactttttatctaaaaaaagacaaattgcattttttaatttctctctttggtaaagaatataactattatttatgtaatacctctataaattgtttttataaataccctcgggaaaaaggaggatcactgatacaaaataatgcaaaggcaagatacaaggtgaaaaatcgtgttttggctacaattttctgaatgttcaccacttcgtcaatgtatttttaaggtatcattctctagattcaatctattggagttttcaatgaaattgctcaaagggcttgcccaatattatgtagatttaatgatgaggctagggttaatccgcttctcattactgttagcatccgcattggttgtattagcgatggtcgtacagatggccgtgacattcctacttgccggtgatgtcactagtatcgatctggtacgctctatcttctttggtttgattattaccccttgggctgtctattttctttccgtggtggtagagcaacttgaagaatcacgacgtcgtttatcgcggatggtcgataaattaggcgtaatgcgacagcgagacttagagctgaattcacaattaaaagagaatattgagcaattaaatttagagatccaagagcgtgaaaaagtagaaaaagcccatcttgaactattggaaaaactcaaaagtgaaatgaagcgtcgtgaattgacgcaaattgaactagagcaacaatcttccttgttacgctccttcttagatgcctcgccagatctggtctactatcgcaacgaagataatgaattttctggttgtaaccgtgctacagagctattgaccggtaaaagtgaaaagcaattaattggcttaacacctctggatgtgtatgacgaagatatcgccgtcaaagtgatggaaaccgatgagaaagtctttcgccataatgtgtcactcacttatgagcagtggttggtgtatccggatgggcgtaaagcgtgttttgagttacgcaaagtgcccttttatgaccgaattggtaagcgtcacggcttaatgggctttggacgtgacattacagagcgtaagcgctatcaagacgcgttagaaaatgctagccgtgataagaccacctttatttctacaatcagccatgagctacgtacgccgcttaatgggattgtggggttaagtcgtattttattggataccgaattatcaccagaacagctcaactacttaaaaactatccatgtcagtgccataacgttaggtaatatttttaatgatgtgattgaaatggataaaattgagcgcagaaagatccagcttgataatcaacctatcgactttactgaatttatctctgatttagaaaacctatcgggattattagtccaacctaaagggttaaaattcaccttagaagcgcaagaaacgttaccgcataaaattaccaccgatgggactcgtttgcgtcaaatcttatggaacttaattggtaatgcggtgaaatttacccaagaaggggaaattaaagtacgtatttggcaagaagcgcctgataagttgttctttgaggtgaaagatagtggtattggtatccctcaaggtgaacttgagaaaatctttgccatgtactatcaggtcaacgacagtcaaggtggacgttctgcaacgggaacaggtattggtcttgctgtctcaaaacgcttagcacagcatatgggaggcgatattcatgtggagagtgagttaggacatggttctatctttacgctttccattgtcgctcctgcgattaaagagcaaagtgattttgaagaggatgatgaattattgcttcctgcccttaatatcttactggttgaggatattgagctaaatgttatcgtagcatgttcagtattagaaaaattaggcaacatggtagatgtggcgatgactgggcaagaggctttgcaaatgtttaagccgggtgaatacgatttagtgctgttagacattcaattacctgatatgaccggatttgatatttcaagaaaattacgtcaagagtttgatagcagtgaattgccgccattgattgccttaaccgccaatgtcttaaaagacaaaaaagagtatttagacgctggaatgaatgatgtgctcagtaaaccgctttctgtggatgcgttgacagccattattaataaattctggggagatgaagcggtttccgtgacatctagtgagtcacctcaattgttgagtaaaaatgaagagttactcgatatcgacatgctgaatcaatacatcgaacttgtcggacctcaattaatcacggatggtttagatgtttttgaaaagatgatgccaagttacctgtctgtccttgaatctaatctgacggcacgtgatcaaaagggcatcactgaggaaggacataaaatcaaaggcgcggcaggctctataggtttaaaacatttacagcaactggcaaaacagatccaatctccagaattacctgcatggtgggataatgttcaggaatgggtagacgagttagaaagagattggagaaaggatgtagaaagtttaagaaactggttggcagacgctagaaaaaaataaccccaaccgaaggttggggtgcgcgaatactgcgccaacaccagggaaacttttctactcgcttttttgattatcattacataggcgaataggatgaagctattccatacatcatacaagcaacaaaatagcaaatataagtttttttgttacaagaaacatttaaatatgtgatggcgattggtgtttacacctataaatgggtaactagtaatctactacaaatggagaaagatatgaaatcaattgcggtaattttaagtggttgtggtgtctttgatggcagtgaaattcacgaatcagtgctcacaatgcttgctttaagccaaaataaagctgaggttcattatttttcacctaatgattttcaacctactgtaattaatcatattactggagaagaaaaagcagaaaaaaggaatatgatggaggaggcttcgcgtatttctcgtggaaaaatatcgcctttatcagatgctaaggctgaaaactttgatgcggtaattatccccggaggttttggtgcagcaaagaacttatgtaatttcgccacgaaaggtgttcagtgtgaaattaaccaacagctcttaacttttgttcaaaagatgcatcaacagaaaaaaccactaggtttaatgtgtatcgcccccgttatgttaccaaagatgttaaatgccccagtaaaactaaccattggtaatgatgcaaaaacggcagaaatgatcaccgaaatgggagggatacatattaattgtcctgtcgacgaaatagtggttgatgatgagtatcgggttgtgaccacccctgcatatatgctggcagaatcgatagcacaagcgcaggtggggattgagaagctggttaaaaaagtactagaaatggcataacaatagagtgaatacagcagatggtactagtgagaaagttaaagaaactattaattattctaattgctttatggttagggatagttgtcctgttttcttttttaccggtgcctttttctgctgtaatgctacaaagacaaatttcttcgtggagtaagtttgatttttcttatgtatcccattctacatgggttaatgaaaatgagatatccccacagatctatttagcggtaatagcctctgaagatcaaaattttccaaaacattggggatttgatttcgatgcgattgaaaaagttttccaaaatagcctgcaaagctcaaaaacgatacgaggtgcctctactatttcacaacaaacggtcaaaaacttatttttgtgggatgggcgtagttggataagaaaaggacttgaagccggaatgacgccagtggtggagctaatttggtctaaaaaacgtattttaaccgtttatctgaatatcgtagagtttggcgacggtatttttggggttgagcaggcttctcagcactattttcgcaagcctgctaaacaactcaccgcccatgaggcggctttattagccgctgttttacctaatccacatattcttcatgttaataagccttccgcgtatttgctaaaacgtcagcagtggatcttaaatcaaatgcggttaatgggaggaacttcgtttttaagcaaaaatgcgttgttataaccgttaaaatactttttttattgattcgtcattttgtgacgccattgttgctattgcattcggatcgtttgcttggcgagattgagtgcgaaattgcgatggtgtcataccatatttacgtttaaatgcgtcacaaaaataagcattactaccaaaaccacagcgatgacttatttgaaacacagaatagttagaaaaggtgaggtaatttaatgcgatccccattctgacatccaacagtaattggcaaaacgaaacgccctctttacttaaatggcgacgtaatgttgatggtgtagtatagagcgtttttgctacatcctctaaatgccatttacgttgcggatcttgtgttattagatgagtgatcgcctgattttttggctcatcataattaaaacgaaaaatattaagaatatcgaccccttcgtgataaaccgccagcaaaataaaaaagaggctctgttgcataaacagggtctcttgagagggggtgccatgttcaagcggtagacattgctgaagtaacgtaaaattagttttaaccacctcaggtgttgatagatgataatctggaagatgacgagtaatcggcgcccctgattttattaatggtttgagtaaagagaacacagattgtaattcagtttcagacagtactaaggtatgtaattcaatcggtttggtcgggaaaaaatttgtcacatcacaagaaacttgactatatttaggaataatcaacgtgagattagtggtgactgtgatagtttgcccattaatacaaatctcaccttttgcaccatatactatcgcgatcatcgggttttcgatgtaaaacgtttttaaggatatttggttagaagaaagtatgtgtttgtattccattgtcttagatataccacaggcaagttcaaaatgaacatgggttaaaataaacaaagcttaaagttaaccacttaatttgtgaacttataagcagtaagcatgggttttattatcacaatattcctattgcgaaaccgcgtcgttataccgaatagtataagagtggctcagaatataatcttgttgctgagcaataacaatatcgatatctgttcattttttacttttatttttaccattgttattttttctaaacaaattgctgtttatttaaaacgcattttttgaaactcggtgtaaaatcgcgcggcattgatggagcgctttatcctgtttgaggaaaatgcaatttatctttattcacaccctacccaacattcatttcattattttctcggtgattttgaatgacataatctgatgggtagtgcggtatatattcgtctatttcctgatttatttgatcaattttgccaagttggcaggagtgggtatgcctgacttttctgagaagggttggcttgctgacatcgctttacgatatgagttaaagcgagggaagacatgtcttactgaaaaacgtcatctcggccccttaatggttcagcgacctttttatccagagcaaggtgttgcacatacctatttgttgcatcctcctggtggggtggtcggtggtgatacgttatccattaatattaatgtgcaaccttacgcacatgccctattaacaacgccgggggcgacaaaattttatcgtagtgcaggaggtactgcatcgcaaacgcagacattgacggttgcacaagagggctttttagagtggttaccccaagagaatatcttttttcctgatgctcaagtgtgtttaaccacacatattcatttagcctcatcagcgaaatttatcggctgggaaatgcagtgttttggacgcccagttttaaatgagtggtttgaaactggcaaggtaaaagggcgcttaaatttttatgttgatgagagattaattttaacagagtcaatgcgggttgaaggcttacaaaaacaagctgccgcaatgcgtgaatttcctatgtttggctcgctttatatttatcctgcaaccgatgcattaaaagagattattcaacaccatttagagaaggtaaatcccctagttgaatatggtttaacggatgttgatggcattttagttttacgtgtattagggacgcaaaccgagccgatgatggcgtgttttgcgcaagtatggcaaatcgtcagacagcactggctaggttattgccctgagccaccgcggatctgggcgacataatcgtttattttaggagcagaaatggaattaacaccaagagaaaaagataaattactgctttttactgcaggccttgttgcagaaagacgtttagctaagggattaaaacttaattaccctgaagctgtcgccttgattagttgcgccattatggaaggcgcacgagaggggaaaacagttgctcaattaatgagtgaaggacgtactgttttaaccgcagagcaagtaatggaaggggtgccagagatgataaaagatgttcaagtagagtgcactttccccgatggcaccaaattggtttcaattcactcacctattgtgtaggtaataacatgatccccggtgaaattagagttaatgcagcattaggcgatattgaactgaatgctggtcgcgagacaaaaaccatacaggtggctaatcatggcgatagacctgtacaagtcggctctcattaccacttttatgaagtgaatgaggcactcaggtttgcacgaaaagagacattaggttttcgtttaaatattcctgctggtatggctgtgcgcttcgagcccggtcaaagtcgcactgttgagttagtggcttttgcaggaaaacgtgaaatttatggttttcatggcaaagtgatgggtaaattggagagtgagaaaaaatgaaaactatctcacgtcaagcttatgcggatatgtttggcccaacaacaggcgatcgtttgcgattagcagataccgagctgtttcttgaaattgaaaaagatttcaccacttatggcgaagaggtcaaatttggtggtggtaaagttattcgtgatggtatggggcaaagccaagttgttagtgctgagtgtgtcgatgttctgatcaccaatgccattattttagattattggggcattgtaaaagcagatattggcattaaagatggccgtattgtcggtattggcaaggcaggtaatccagatgttcagcccaatgtggatattgtcattggccccggaacagaagttgtcgctggagaaggtaaaatagtcactgctggtggtattgatacccatatccactttatttgtccacaacaagcccaagaaggtctcgtttctggcgtaaccacctttattggtggaggaacaggccctgtggcgggtactaatgcaaccacagttacccccggtatttggaatatgtaccgcatgttagaggcggtggatgaattacctattaatgtgggtttatttggcaaaggttgtgtcagtcagcccgaagcaatccgcgaacaaataacagcgggtgctataggtcttaaaatacatgaagactggggggcaacgccaatggcaattcacaattgccttaatgtcgccgatgaaatggatgtacaggtggctattcactctgacaccttaaatgaaggtggtttttatgaagagacagtaaaagccattgccggtcgagtgatccatgtattccataccgaaggcgcaggtggcggtcatgcccctgatgtgatcaagtcggtaggagagcccaatattttacctgcatcaaccaacccaacgatgccttataccattaataccgtggacgagcatcttgatatgttgatggtctgtcatcatctcgatccctctattcctgaagatgtggcatttgctgaatctcgtattcgtcgcgaaaccattgctgcagaagatatcttacatgatatgggggcaatttcggtgatgtcgtcagactcacaagccatgggacgagtcggagaagttatcttacgcacttggcagtgtgcacataaaatgaaattgcaacgaggcacattagcgggtgatagcgcagataatgataataatcgtattaaacgttatatcgctaaatacacgattaacccggcactggcacatggcattgctcatacggtgggatcaatagaaaaaggtaaacttgcggatatcgtgctatgggatcctgctttctttggcgtcaaaccggcacttatcataaaaggtggtatggtcgcttatgcgccaatgggggatattaatgcggctattccaaccccgcaaccggttcattatcgtccaatgtatgcctgtctaggaaaagccaaatatcaaacgtcgatgatctttatgtcaaaagcgggtattgaggcgggagtgccagaaaaattaggcttaaaaagcttaattggtcgtgtggagggctgtcgtcatatcacaaaagcttcgatgatccacaataactatgttcctcatatcgagttagatccacaaacttacattgttaaagcggatggtgtaccactggtttgtgagccagcgactgaattaccgatggctcaacgctatttcttattttaaccagcgtttttattgagaatttattgaatgaaaaaatttactcagattattgatcaacaaaaagcgcttgaactaacctctacagaaaagccaaagttaaccctttgtcttaccatggatgagcgcaccaaaagtcgcttaaaagtggctttaagtgacgggcaagaagccgggctatttttgcctcgaggcaccgtacttaaagagggggatattctgctgtcagaagagggcgatgttgtcaccattgaagcggctaaagagcaagtatcaacggtttatagtgacgatccattattgcttgctcgtgtttgttatcacttaggtaaccgacatgtaccattgcaaatagaagcgggttggtgtcgttattttcacgatcatgtattagatgatatggctcgcggcttaggggctacggtggtggttggcttagaaaaataccaacctgagccgggggcttatggtgggtcatccggtggtcatcaccaccaccatgatcaccaccattaatggcactgcgatcatcaaaggaggtgcatgatgctagctgatctgcgcttatatcaattagttagcccctctcttccggtaggtgcttttacttattctcaagggttagagtgggccattgaaaaaggttgggtatgctcagcagaaaccttgtcagattggttaagcgcacaaatgaccggaacattagccacactcgagcttcctatattgcggcaattacaaacgagtttggcaaagggtgatagcgatacagtgaaatattggtgtgactttatggtcgcaagtcgcgaaaccaaagagttaaggcaggaagagcgtcaacgggggatcgcttttgcccgtttacttcctcaattaggcattgaattagacgatacgttacaacagcgggttaaacagacgcaattaatggcgtttgcgttagctgccgtgcattggcatatcgatagtgaaaagctctgttgtgcctatgtttggggctggttagaaaatacggtgatgtctggggtaaaactggtgccattagggcaaagcgcagggcaaaaaatgttgtttgctctagctgagcagatccccgctattgttgagttatcggcacattggccacaagaggatattggcagttttacgccagctcaagtgatcgccagtagtcgccatgaaactcaatatactcgactttttcgttcatgagataaagagatgcaagaatataatcaaccactgcgtattggtgttggtggccctgttggttcaggaaaaacagcactattagaagttctttgtaaagctatgcgcgatagttaccaaatcgccgttgttaccaatgatatatatacacaagaagatgcaaaaattttaactcgtgcgcaggctcttgatgcggatcggatcattggtgttgaaacaggaggatgtcctcatacggctattcgtgaagatgcttcaatgaatttggctgctgtagaagagttggcgatgcgccataaaaacttagatattgtttttgtcgaaagtggcggagataacttaagtgcgacctttagccctgaattggctgatcttactatttatgttattgatgttgcagaaggtgagaagatccctcgcaagggggggccggggatcacacattctgatctgctggtgatcaacaagatcgatcttgcgccttatgtgggagcgtcattagaagtgatggaagcggatacagccaaaatgcgtcctgtgaaaccttatgtttttactaacttaaaagagaaagtaggtttagagacgattatcgattttattattgataaaggtatgttgagacgttaatcactatgagtaccagtatcggttatcgctgttacaatgaccgatactggtaaaataatacgctatcaccacgtgatacccatcagcgatacatttagtttagataggtaaatgccgttgttactttaacaacacctttggtttcactggcaattttagcggctgcagccccttcttgacgggtcaatatccctaacaagaatacttcgccattttcggtgatcacttttacggaagatgatttgacggcatcgctagctaaaatttgtgaacgtactttagtggttaaccatgtatctgaagaagcagtgcctaatgtcacaggctcaccttggcgaacttcattataaacattgtttactccttccactttgctggtaacttgtttggccgtctcagcaaccgacatatctggactttgtccagttaacaatacattaccttgataagcggtggcgacaatgcgcgcattactgttcttgatctgttggtttttatttagagcaccagaaactcgggcttccaatgtgccatcatcaacttgttgtcctaatgaacgaggatcggttgcggttttgccagcaacggcagcagtacccaccacagcggcaccaatacagccttgtagcaatagcgcggaacaaagtactgcggtaatcggaagcaatttcatagtaactccttagtcatcctgatgtgggaataatgtattatcaattaagtcgcagagacaattgaccgttaacatctgcacttcctgtattctgactgtacgctgagaggggatcctgatctccacatcttgagggcctaataatccagcaagctcaccgccatcatagccagtcagtgcaacaatggtcatatctcgagtaacagcggcttcaacagctttaataatgcttctgctattaccatgagtggaaatagctaacagtacatcacctgcttgccctaatgcccgtacttgtttggcataaatttcatcatgttgctgatttcccataatggcggtcatcacaacactgtcggtatttaaagataatgccggtaaacttgggcgctctgtttcaaaacgatggatcatactagcagcaaagcgttgagccgttgctgctgagctaccgttgccacagcttaatattttatgtccgtttaacaaagattgaaccatcatcatggcagctctggaaatggcatcgggtaacgcttctgctgctgcaatttgagtttgaatactctctgtaaagcagacttttattctatcaagcacgttaagacctatataatctaatttaacgaataaattccgtatgatcgagaatgttttttagccatattaactggcgttgatcaaatgcacaaatatcaaagcgacagttaaccgtctcgatactttgttggcgttgagctaaccaacaattggcggcgtaccataagcggcgccgtttactgtaggtcactgagctgattgcatcaccaaattgtgcactacgccgaaagcggacttcaacaaatatccatgttctattaccctgcataataagatcaatttctccacagggatatcggacattacgctcaattaactttaacccttgttggcgcaagtaatttaacgcttttctctcataatattgtccgactagataagtacttttaggaataatcatccatgatttcctgatgttatctcttataaataaaccgcctcaaggtaaagtcaactccttatccggagacttcaaagaggcggtttatggggtaaattgcttacttattgtcccacaggttcaattttaccttgtttaaattgcatccatgggagttgtcgataaatagtgcaattatcttccacacgtaaagagccagaaacaccattgaactgtaaggttcctttggtgagttcattgtaattgtttgctaatgaccatgcatcaatacccatagcgtaaaggcgcattaatgagtaatcgttcgcaaatttactggatgctttttgcattaacggtaaatttgctcccgtcataagaggaatatcactaaattggataccgtccatttccatacgaaaatctggccccattcccccttgattactgcgtgaactgacataaatcggtgggcgttttttggtactgattgccatatcaatcattggtttaatcaatgttaactcatcgctagtggcaatgatatacacagaatcgatagcaccgtttgttgttggcattgaagcggtatctaatggcagtggtgcattgtctgttggcaatacaggggttcctgtcattcgaatacccacgccacgattaattgaactttttagactatcaagagagccgaaagtttgttgtaagacggttccccccccgctacgctgccactcatccgcaaaagtttgtgccattctttgaccgaatttattgtcaggaacgataataagtggattagatttttgttgctggcgtaagtgttgagccgcattacgagtttcatcttctggggaaagtgaaaagaaacacactgtagtagcaagaggaatattatcaacttcatttagtgctaaaacaggtaaaccactttttaattcaatagttttgatcacttcgggttttaatagtggccccacaattaaatcagcaccctcttgttgcacttgtttcagtaacagatcaatgggttggctattggtatcatacataatcacttggcgattattttggacaataggatctaattgcacgcggctattacccgcaaaggcttcggtttcttttgctgaagtagcatcactattttcagcgccttccgctgtattatcatccgttgaattatcgttttccgttgttgctgtgtctgcattcggagatgaaatacctaattctgctaaaatggaagctaaactatcttgttggggggcttctggcgctgcgttagcttgaggttgaggtaaaccttctttagcatcggtaaagccttgcataatagcattaccaaatactttagcttgtcctgttaacggtaataataatgcgatttttccgctattactgacggcagattgtgattggcgcaataacagcgtcggtaatgttagcgctcctggattgcgtggatagcgtgtttgccattcgcgtattgcttgggataatttatccgcatcatcttggttatattcataagtgttgagtaaatctaaccagccttgtaatgtattttcatcagctttgattaccacactacgacgttgctcaggtgtaagcttcgtgagtgttaaccaagtatcatcaatattttgctgatgtaatacaggatcagtgataaggggttctaggccaatataggcacggatcacatctaaagaggcttgtccgttcgcatcatcaatgactttctgaaattgtttcatttccacttgcgctttttcagcaggtgtcagtggctgttgttgttgccccgtcagggtacaacctgacataatcaaggcagaaagtattgcagtataggataaacctgttttaaaacgcacaaaaattgaggaaagcatactgtacccagtgatgttttataattatgctcaattttaaatcggtcattcggaataaacaatgaatcaacctaatcgagcagcggtaacgacatccacactgtacatagtacccacacccattggtaatctgggcgatatcacccagcgggcacttgatgtgctgtctcatgtcgatttaatagctgcagaagatacccgtcatacagggcttctattacagcattttgccattaacgcacgtttgtttgcgttacatgatcataatgaacagcaaaaagcagatcaattaattagcaaattacaacaagggctaagtatcgcattagtctctgatgcaggtacaccattaattaatgatcccggctatcatttagtcaatcagtgtcgcaaaaacggtataaaagtggtgccattacctggggcatgtgcggcaattaccgcgctatcagccgccggattaccttctgaccgtttttgttatgaaggttttttaccagcaaaaacaaaaagtcgtcaagattgtttgcgtgatttagcacaagagccacgtactttaatcttttatgagtccacccaccgtttattagatagtttagcggatatggtgacggtttggggggaagcgcgctatgttgtattggcaagagaattaaccaaaacgtgggaaaccattcaaggaatgcctgttggggaattacttaactgggttcgtgaagatgaaaatcgccgtaaaggggaaatggtattaattgttgaagggtatcaaaagccacaagaagaccattttgccccagaagtattacgcacattggcgattttacaaaaagagttacctttgaaaaaggcggcagcagttaccgctgagatttatggcgtgaagaaaaatgcgttgtacaaacacgtcattgcgcaaaatgaagcggaacaagatcagtaaaacgattttttgtttctttcgctatacattaacgcggaaaatccttataatccgccccctgagttgactagacaaccgctgctttatcgttgtcccttcggggagacggatagaggggaggaaagtccgggctccacagggcagggtgccagataacgtctgggaggcgcgagcctacgacaagtgcagcagagagtaaaccgccgatggcctgtttacaggatcaggtaagggtgaaagggtgcggtaagagcgcaccgcgcaactggtaacagtttgtggcatggtaaactccacccggagcaagaccaaataggggttcttatggtgcggcccgcattgaacccgggtaggttgctggagccagcgcgcaagttctggcctagatgaatggttgtccacgacagaacccggcttaacggtcaactcaccttatataaaaccctcgattcactctgtggctcgagggttttctgctttattgctattgctagtgtgatgataaatgattgcttactgatatcgctagctgattaagaaacgatatcaataaaaagaccacgaaaagccttttgacatcttagcgctagcatattgctatcttgaataaaagcaccatcaccacaacggatttccccaagctcttgctctgaggtttggaaatggacaccgcctttgatagattgcaaatagcctttctgaccctgtatcggcaaggttatttcatccccttgcgctaaattaatatgatagagccagatattttgccttagcatcaaactgccattatcccctgatggggaagccaataattgatattttaaatcttcatttaaagctaatttttgtgaagcgatgctctcttgttgtggacacgcgtttagccataattgaatacgagttaatggggtatctggactactatttctttcaatgtaagtttctgtattatgaggcgaaattaataaacactcgttttgtttggcggtaagtgttcgccccatattatcaagataagtcgcttcacctcttaagatcagattgacgacatccacatgaggataggtttttgctttaaactcagaatttggtgcgagcacttcttggttcagtactcttaatgtgccatagtctaaaaaatgaggatcgaaatagtggccaaaggagaatgtgtagcgagcttgtagccagccatagtccgctttgccacactgttgtgctgttctgtattttatcatcgcggtacttttcgagtcgattaatcaatatattcatcatagagatatggactgtagattgttagcaagttaatctggtgccaataatcaaattatttgatagagataagtataatgagtaaagataaagccattacattggaatctctacgagtgatggatgccattgatcgtagaggaagttttgctgccgccgctgatgagctaaatcgcgtcccatcagcactcagttataccatgcagaaattagaagaagatttggatgttgtgctatttgaccgttcaggacatcgaactaaatttactaatgtgggaagaatgttacttgaaagagggcgtattcttcttgaagctgcagataaattaacttctgatgctgaagcgctagctcgcggttgggagccacatattacgattgtgtgtgaagcattaacacccgcatctcgcttattcccgttagttgaaaaattagctgaaaaatcaaatacacaactctctttagtcaccgaagtacttgctggggcatgggaaagcttagaaagtggtaaatgtgatattgttatttcaccggatatgcattttcgttcttcatcagaaatcaatttccgccctttatataataccaccagtgtctatgttgccagccctgatcaccctatccataatgaacctgaaccacttgcagaagaaactcgcttaaaatatcgcggtattgctatcgccgataccgcaagagaacgacctgttttaactgtactgttattagataaacagcgtcgtttaacggtgagttcgattgaagataaacgtcgagcattaattgccggtttaggggttgctactatgcctattgatttaattgaagatgatttaaaagaggggcgtttacgtgtggttggccctgaatatcatcatgaaaataatattattatggcgtggcgcagagacagtatgggagaagctaaatcctggtgtttacgtgaaattcctaaactctttgccgcggataaaaaatagtttgttcgctagagtttgataatgcaattaaaaaagatccccctagaggatctttttattattaaatctattattaccaatttttcttaagtaggcgatctaagctccatttacccggacctgtgataaccagtaataaatagccacccgcaatagtcatatttttcataaacattaactgatttgcaccttctgcaaagttagtgtggaacagtagtgcggttaacagtgtaaatacactggtaaagatagccgttgtgcgagttaagaaaccgaataatatggctaatccaccccctaactctaataaaatggttaaaggcaataaggctcccggaacacccattgattgcatatactgttgagtaccttcataggcttcaatttttccataccctgcgctgataaataaaattggcatgagaatacgtgcgattaataaggcaatgttttcaaaattcttcatgatgtttattcctgataaaattttatattatttaatatatctgtattttatttgtttaattgccagtttttagtgtaaataaccactgtttggcttgagatatacaataaagaaaaaataatatggaggatattaagaagaattaacattcttacacaaaaaaattgatgtttagtcagcggtttttttgacagacttctgtaatgtgcgtattaaaccaacagcgcctatcgcccgtcgtccccaacgaaccagttttttagggtgcttaatgctataaagagataccacgcttgcccctattaacaagataggttttaacgaggttaagatattccatgctttatcataaggtgctgtgacctctaaccatgtttgcccctcttgcgctaattgagtgcgctgttgttgaatttcatccaacaacagctttttgcgtcttgctaatgctaaggtgcgtctattttgtttgctcatcgcgatattgctccaaaagacgcttatctaattctagttgttggcgagtatcacctaacagcgttgaattacgggcttttctcaatgtcatgatagcacctattaaggcaccaactagcaaaatagccgttgtaatcgctaaagcatgaatacgatattcaggtgggatcacccaaaagaggagaataagtagactcattaagccaaaggcggtgagtaataaggtgatccccgccattaaaataagctgaataagtgtaattttttcttcttctagttcgatggcgattaattttaggcgggtttcaaccatgccaacgataacagcgccaatacgactaagagaattcagaaccccggatgcggggccctgtggtctttgagtatcactcattatggattaacgtttcgaaagtagaacaccgagtacgacacctactgccgcgccaataccaacacctgtccatgggttttcacgcacatagttgtccgctttacccgccatttctttagtgttatcgacgatttctctacctgcatcactgagttttgcacgagagccacgtagcgcatattcagctttttctcgtaaactttgtaattcctcttttgatttatctgccgaggagttcagaacttcttctagagtatcagccagagattttaattcactacgcagatcttcatttgaacgttggtgtgacatgagtaactcctttaatcaagatatgaggttatacctataacaatagactagatttaccatataataaaattaaataatgacttaattccctaaaaaagagaaaagtcttattcttgccaagggtgatattaaaaaaataatcagtaatagcttgaaataaaaaacaaaagcctgttttaatcataaaacaggctttaagatgctaaatattaacgctatagaaaataatagaaatagcgatagattacggttgattactctgtttacttttcttcttaatgacgacccatacactcccgattaggccaatcactaataaacaaacaggcagtagcatcagaaaattcattaaatgatgctcatattggcggaataacggactatttcctaataaatagcctaaggtggttaaaataccaacccataacagaccacttagccaattaaaaacttgaaaacgaccgttttgtaagccagcaaggccggcaatagtcggcaataatgttctaacaaaagcgagaaaacgaccaataagtaatgctgccaagccatgtcgatggaaaagtccatgggctcgttggtggtagtgttctggtaaatgtgataaccaacttcgtacaagtcgggtgttaccaagccacttcccttgcagataacccagccaacaacctaagctagcacctgccgttagaataagtaaggttaatggaaaacccatggttcctttagcaattaacacacccactaaaattaataagctgtctcctggtaagaaagctgcgggtagtactccgttttctaggaatagtatgctgaataataaaatgtaaataatccaaagcagtgagggattcgctaaggtttcgtaatcttgatgccaaagcgccaagaacagctctcttacgatttccatataaaaggcttcctaaaactgagtcattcgggggtaaatacaaaaacattctctcttgttatctatttacccgtaatacatatcatagggtttatttttcattgtttaaaacagcaacactctaacaaaatcaataaaaactagacagaaaattttttcacttaaataccctacaagcgcttcattgagcaagaatatttgaaaaaagacattcacttttgttttccagtttaggatacgttgttttaaagaaaaaaccttaagaaaacgtaataatagaattactatgatgatgttttactgagataaaaaagcattatttttccttgctgattgaagctaatgtcatggttatttattcatcaaaaaaagtgttttaaagttgccaattggctagttaaactgattaaaatgttattaaaaagttaaaattaaactcatcaagtgattaagaaaaatcaaggtaaatagtataagagttagttttttatttaacgattaaatctaaccttatgataataataatttctttcatttgtggactgtacgttaaaaagaacaaaatcctattatgatcacaattgtgttattttgttgttaacaaaaatagctaatgatgtatattttgcaaaataagcttttcagcaagattcatttccttatactggcaaaagcaagcacacaattgcttttttaaatattattttaagtaatggaataactatggataaacaacaatccagagtacttaacctgctttttcagggaagtctcgttaaacaaatacttgctggtttaattgcgggtattttactggcttggttagcaccagaagtggctaaaatgatgagcttattaggtaacttatttattagtgccttaaaagccgttgcgcctgttttagtctgggtattggttatggcttcgattgccaaccaccgtcaaggacaaaaaaccagtatacgtcccatattagtgctttatctgctcgcgactttctttgctgcactgacagcagtagtggcaagctttgtgtttccctcagtattaacgctagttgtcaacgattcacagctatcgccacctgaaaatattgctgaagtcttaaaaggtgtattaattaatgtggtggctaaccctgtagatgcactgattaacggcaattatatggggattttagcttgggctattggcttaggtttagcgttacgccatgcaagtgatacgactaaagcattaacacaagattttgcagatgcggtaactaaccttgtgcgtgtggtgatccgtttagcgccaatcgggatttttggcttggtgtcatcaaccattgctacgactggctttaaagctttagctggctacttgcatgtcttacttgttttaattggttgtatgctgtttgttgcgctcgttgtcaacccattgattgtattttggaaaattcgccgtaatccttatccattagtatgggcttgcttacgtgaaagtggtgttactgccttctttacgcgtagttcagcggctaatattccggtgaatatggcaatgtgtcgtcgtatgaatttaaatgaagatacctattctgtctcgatcccattaggtgcgaccattaatatggggggagcggcaatcactattactattttaacacttgctgcggtaaataccttgggtatgcctgtggatattccaacagccttattgctaagccttgttgctgctatttgtgcttgtggtgcatcaggggttgctggtggctcgctactgttaattccgcttgcttgtagcatgttcggtattagtaatgatttggcgatgcaagtagttgcggtaggtgtgatgattggtgtcttacaagattcagcagagactgcattaaactcatcaactgatgtgctatttaccgcaacggtctgcatagccgaagatgagcgtttagttgccaacccattaactgaaaaaaataatggctaaagagtataagtagtaaatagatataaagagtagtaagacaggaagggtagtaagtaacaacaaaaattaataataaaaacagaaccccatataggaaactatatggggtttctggttattgatatgataaatcgagtgttaaatagtaagtgctaattctgttccctgcttaatggctcgtttggcatctaatgctttagcctcttttgccccgccaataagatggacggttttattttcttgttgtaacgcttgcagtagcggacgataagattgttgtccggtacataaaatcacgctatcagccgcgagcagttgctgttgttcattatgttcaattattactccttgctcggtaattttttgataatggcagccagttagccatttgaccccttttttctgcaatgttaagcgatgtatccagcctgttgttttacctaaacttaagccaaatttcccactcttacgttgcgtcataacaatctgtttgtcttttttaataaaaggatcggcggaggtgatccctccgcgatgcgtaagtgttgggtcaattccccactctttattaaatgcacaagggcttaaactactgcattggcctgtttgggtaagataaaggccagtgtcaaaaccaataccaccactgccaataatcaccactttttcgccggttggttgatggtatttaaggacatcaagataggtttttactatcggattatcatggccatcaatctctggaatatgagggataacaccactggctaaaataatttcatcaaaatgttgcagatgggaaagtgtcgcttccgtattattttttacgatcacccctgtgatttgcaattgccgcttaaagtagcgcaatgtctctttaaattcttctttacccggaatttgactggcaatattgagttgtccaccaatacggtcttctttttcaaataaagtaatatgatgaccacgtttagctgctgtaatggcaaatgctaatcctgcggggcctgcgccaacgacagcaatttttttaggggcttgagtcggggttaaaataagctctgtttctcgacaggcaaaagggtttacaagacaagatgccgggtgaccactgaatatttcatctaagcaggcttggttgcaggcaatacaggtgtttatctcatcctcgcgaccaagttgcgctttcaatacgaattgcggatcggcaagaaaaggacgcgccatagacaccatatctgcacagccttccgctaaaatagcttcagccacttgaggtgtattgatacgattagaagtgataagaggaatattgatttttcccatcaattggcgagtgacataagcaaattgtcctcttggtaccatagtggcaatagtagggatgcgggcttcatgccaaccaataccactgttgattagggttgctccggccttttctactgcttgagcaagataaaatacctctgaggcattagctccctcggtaattaaatctaacattgataaacgatagataatgataaagtgttcacccacagcttctcttatgccagctaaaatacgtaatgcaaaacgacaacgattttcaatagagccaccccattgatcatcgcgttgattcgtatgacttactaaaaactggttaattaaatagccttcagatcccatgatctcaacaccatcatagccagctttctgagccaacttagcgcaatgaatataatcttcaatagtctgttctatctgctcatgactcattgcttggggcataaaaggggtgataggtgattggatcgctgaaggggcgactaaattaggctgataactataacgaccagtatgtaaaatctgtaaagcgattttcccatcctgtttatgtaccgcatcagtgactaattgatgagaagcgagttgatcttctgacattagcgttgctgcatgtggcaataatacaccttgcttattaggggagatcccaccggtgacaataagtgccacccctgctgcagctctttgagcataaaattcagcaagcttaggtgcatcatgtggatcttcttctagtccggtatgcatcgagcccatcaaaatacgatttttaagcgtagtaaaccctaaatcaaggggagtaaataaataagaatagtgtgccatcagataccttttttatactggtcagatgagatatctatagcataacgagaagttgctgattaagagttgattatgttaataagttgtgatcttaatcatggaaaaggtgaatagctcctaattaaacgataataatctaaatgcctcgtcaaccataacaaataatgataataaaaattgcactcattcatattttttaatcatataataataaatacccattaatacgtattaaaaatgcccatcacattgttgattttggagacgttatgattaataaatttaatcagcttacaaaccaccccgatttaggtaagtttgttttacgtgtttcgctaggtgtcttaatgttattacacggattacacaaaatggagccaggaggacttgccggtatacagggaatgttggcaaatattaacttacctgcatttattgcttatggcacattactgggtgaagttctatgtcctatcttactgattatcggtttatttactcgattttcagcatttgttgtggcggcaaccatgggggttgcggtgctgatggtacattccggtgatcttttagccttagatcccaaaacggggggatgggcacctgaaagtgctggcttctatatgtttgctgcgattgcggtgatgtttttgggtagtggtcgttgggcgctcaaaaaagattaataaatttaatagacaataatattgaatgaaacattgctaagttattcaggttagatgaataaacgcccagaataaagatatgctgggcgtttattattaaagtgataaatagaaatttattgctttgttggcggtgttagtttgaagattttttcattttcacccaaccactgacgagcaacttgattaacatcactgacacttattccgttgacaatcgcagtctcagttaatagtcgttgatattgttggtcatctgttgccacttgagcaagtgcatcagtccaatagctagcactctctttggcttgcccatattcagttaaccaaatattttttgcctcttgtaattctttatcggtaatacccgcttgttttacgtcattgaccactttacgcgcaagtgcaattaattcatctgcccgctgtggtgatgcggtaaagtttaaacgtccggtataaaaactacttggcagcttggttagtgactcagaaaagcctagcgagtagatcccgcccgctcgttcacgaagattaagtcttaaacgttggctgacaacggtatcaagcaagttaagtgctaacagttgctgttgtgaccattgggctttggctgcgtattgaatactgatcatactcttatcgctactggcaatagggtaggttttattaaatgagcttaatttgggattaatcgccggatcagcccaaaatagacgttgcgatgaacgtgtcggcagcgttgctatccaacgttcgatcatcggtttggcctgatttaggttaataggcccactaatcaccaataccatatcggcaggctgtcctagaagtgattgattcgtttgttgtaattgttgtgcggtaaactgttgccaagggccttgtggcgaaattactaagcgctcaccgttttgatagctctctttattaatatgatctaagaaaatacgttcaactggtgttttggcgatccctaatgccgttgcttgtttttgttgctctaatttttgcccattaaattgtggtgctgtcacttttaaatgcaataaggccaacaaggtgtctaactcatcaataggcgcttcgccacgcaagccgtggaataacaactcactgtatggacgcaaactgatttgatgctgtttactaaataacgctaactctcttgcgttgtaatgcccatatccactcacttctggtaagtttaatgcccactgaaccaagcctaaactttgtcctgtttccagagaaacacctccgggaatacgcagtgatacttggatattgtcttttagccactggtcatttttaataataacttttacgttattgctcagtgtccacagctgtgttttttcaatcggaagtgtttgtgtggtgacaacagtaccggtttgctcaggtttaatatctaataccaccgcatgggttttcaatgtaaacgcaccgggatcagattgtctaatctcttgccagcgttgcgaggctttagtggcactaaatacctgactatcactatctgggccgataattgccactcgtggtgaagcttgtgttaggtattgggcaaaatagtgttttaaggtatcaggtgtaacgttatttattagttgataacttaagtttaacgcctgctttttgctttggattggcatttctaattcaagtgccgtagtaatttggttagctaaataaccatgctcatagcgctcttcaccagcagcttgttggctaagacgttttaacagcgcattgcgggcattatctaactcttgctgagatactggctgtgaggctaaacgctgtacttcagtaaatagaatatctaatgtaccttgataatcatcccctttaggatgggcaatcatcaattgttgtgagcgacgggcatctaacatcgcaccttgtgtattggcactgacggaaggcactaacccattatcaacaatggttgaaaagcgctggtttaagatggagagccacaacgagtccattaaatcatcatattgaccttggcgactatttaatggtgcaggcagtgtacgctgtagagtgaattgcacaatgcgtgagccttgctctttatcaaaaatcgtctttactaataaatctttattgtcgataaagcggtgccatgatggagagtcaacgcctttgttttcactattttttgcattgaacatctgggtaatatcagcaatcgcatcaccttgattaaaattacccactaacaccaatgccattctttcaggctgataccaagtatcgtaataacgttttgcttctttgacatcaccatgcttaacgatatctaagtccccaatgggatcacgatctagataacgactgccataataacgtaactcttcaagttggcgattaatacgaaaaccaataccttggcgtaatcgccactcctcgacgatcaccggacgctctttatcaaactcaacgggatcaaatgtcatgccaaaggcccaatcggataagatcctcaaccctgtttttatttgggtcggattggcattaggcagggataatttataggttgttgagtttaagctcgttgccgcattaacatgactccccaacttcattcctaggctttcaagctgtttaaacccagttgttcccggaaaatgagtcgtgcctttaaaggccatatgctcggtaaagtgggcaaagccaagttgtttttcatcttcttgtaccgagccacttttcaccagtaaacgcatttcaacccccgtttgtgggcgttgtagcaaatagacatttaagccattatcaagcgtaaaatggcgaatatcggggcgcagtgaaagggcattattggtatgctcagacgagttgcctgttgcacaacccagaagtgataaactgactgagataatcagtaacttacgatacatattcagtaactccagctgattgagaggaggacgcagtcggcgcttgtaatgaaattacttgctcggcaatagcgtgagtgaaacgctgatgactgactaagacaatgcccgaggttggtagatgctgtttaagtaataacaacatatgtagggcattttgttcatcaagagcggatgtggtttcatctaataaaataagatcgggtttattgagtaataaacgggcaaagataagacgttgttgttcaccaccggataagcgtgttgtccaatctgtttccagtgaaagctgattttttattttatctagccccacccaatgaagcacttcttggtactcttgttgtgagaactgagatgcttggcaaggataagccaataagctatctaagcgggcaacaggcagatacatacgttgtgggagccaactgatattggttacccgttgaatatctcctttaaaataaggccagtggccgcttaacgcacgtaacagtgttgatttcccgatacctgagctaccttcaattaccgccaattcacccgctttgagagaaaagtgaatattgttaattaataatctatcgtcttgcataaatagcgataaattggctgtcagcttagtttgtttatcatctaactcggtgatctcaggttggtgatcatgctctaacaacaccacaaaatgataaagacgggtaaccgttgcctgccatgcggcaatctctttataggagaaaataaaccagcttaatgccccagcaacactggagaaggcttgtcgtaactgcattaatccccctagcattaattcgccggcgaggaattttggcaaagcaaaaataattggcgccattgccgtggcttgctgataacccacagtaaagaaagcaaggtttctttcataacggataaggttattccagttgcggatcacccctaaaaagcgtcccatcagttcatgacgatcgctcatttcaccccgttgaccagcaatagcatcaccatgttgtttacgtgtgataagcgcagtacggtaatctgcctctttacgctgtttatccatattgattttacgtaatggagaaccaatgagctgggtgatggtgatcccgataagggtataaataatacaggcccagaacatataacccggtatattccactctttgcctgctaaagagaaagagagcgcaccagagagtgaccataaaatagtggcaaaagagataagcgttaacagtgaatgtaaaaaggtcactgttaagcgcattgtcgattcaattagtaaacgaatatcttcggcaattcgttggtcggggttgtctggctcttgcgaggttaaccgcaacatatagtgtttactattttttgatagccagcgctcaagcacttgctctgtcataccttcacgccagcgaatgatcattttttggcgtaagaaatcacccatcacgactacggtaattaatccggcaataataatcacaaactgttgaagcagtttatataaggcttgcccatcgagttgttgtagggcgttatagaagctgccattccattcattcattttgacgttaaaccaaacggatgagagggttaacgttaaagagagaattaataggaaccagcagtaaagggcggtacgccgcccccaaaaaggtgaaaccaaatagaaaaattgttttattgttttcattgcttatttgtcatgtttttattgtttattgactcggttgctcacattaacttcatcaatttttaatagtcatagctgacttgtagccagaactgtcgacctggctcgtaagatttgtactctttatcttgataggtaatgtaatcattgacatttttggtattgagtacgttattcacttcaacggaaatacctacaccgtaagcaaattcaggctgccaactgagcttggtatcccaagtaaaacgactactgtaatgacgttttttatattcaaatagcgggccgtactcacttggttttggcgcaccattattggctttctctgcttgtgaacgagctccattccattgcaaacggttaaaccaagtcactcctacatcatcccaaacactggttagctcagcggtcacttttaacggcgagttaaagttgtcagaaggtaagtctttggcattgattatttttccgccataccacaccttgtcatagttcatcccttgaacgctgggatcaaaattggcataacctgagtcttttggcgtattggttttgcttttttgccagctaatcgaagcattaaagacgtgatcggctttagcaagctcccatggttggctatttctcacggagagcgttaaggtatcgtgtgtactacgaccattattattgaagtggcgaatagcacgtttttcatcaatggttgagtctggatatttagtatcactacgcacctcatcacgaccattgcgatgcacatactgtaaacgccaagtggttgaggctatctcttgttgtagacctaaagtgaattcatcgttataaggggtttttagtgaatcaacaccatcaaagtcggtacgattagtccacttttcctccgatgtttgacagtcaaaatagcagtgttgtaaaccggcattttgcgcaccataaagggcgtaagtgagcattgaacgtccatagtaacggtttaccccaccaataattaaagtattacctgtgccccaaatatcgtaagtagcacttaaacgaggtgagaggttgtttttttgtacaaaatcatcacgatctaaacgtacaccgggacgtaaggtgaggcgtttatattgaatattatcgtcaataaaaaatgaataattggtataagacgcattatgggtacccgctagaaaacgcgtcgtttgtgataagcttcccatccattcatcattgaccgtcatgccgcgataggtatagttgtaataggttttatcacgaatataagcgcctttggtgcggctaatttcaaatccggtggtggggcgatgagtgacggtaccccacacgataggatcaaaacgcataatactcttggcgctataggtttcttgtttactacgcagatcaccttgaccaccactggagacttgattagggtgttgccaatcagtgtaatcttctactttgataaagtagtcttgatcattggtgcgtttatcttccagattttgataacctgcggttaactctaaggttcctagcgcaagttgatgcttataaagggcggtaaaactgagtccattatgttcattatcataaccggagttatacacagagctggagaacagatagctcttatagcgggcaatattacttgatagatcaaaagattgtttatcagagatattccaagaatatttgataaagtagttatctgaagtacgcgtttgatcacgataatgtgggctttgtaatacatgctctaattcgccttcaggggtgtgaacaatacccccttcagcacttatcatcatcggaatggttgattcccgacgagaagctgagaaaattaatcctgtattttccgttaaacctgtttcaaaccaaccgccatagttttgtttatcatattttttctggaaacgggctggattactaaaatcattatttgcagtatcaaattttaatttgggatcggtgaaaatattattccagcttgaacgggtagtacggtaataggcattggcatgggtttcaccagaccaacgacgactttgtacttcaactgtgcctccagtaaatccgccaaattcaacgggaatattgttatcgtaaacggtgacactatcaataagtcgactatcaagatacatcccttgctcatcactggtaatacgggtattggtttcaccattgcccgaattggccggatcaaagtcattattaaaactgacgccatcaagtttataggcattttgatagctactggagccatgaatagaaatacgtgagggcttaatttcaccttggttcatcgagttgctatcgttatttgcaaattgaaccgcaggattacttttaagtaagtcggtgacattgccatcgccagtattacgttgctttatctcttccgcggtgatgtattgtggtgctgaaacaacatctgtagcaggatgataactgcttcctatccctgtgactttaacttcagggatcacaatcgtactgctcgttgctaatggacgaataacaaagccatttccctgtgaaataatttccataccactaccgattaacaccttttgtaatgcggtatgggtttcatattgaccagagagtgcaggagcccgtaagttttttattgcgttggcatcaaacagaatttgtacctgaccttgtttagcaatagtgtttaaagaatcagctaaagattgctctggtaaagagactgatagcgttgccgcataactataaggggctgccacggtagccgttattaataatgtgagtagcgacctttttaggggcctttttttattatgtattctcatttcaccaatcccattcatagacttaataatttttgttactaagtaagagggtgaaatgagaattatcctcacctgtaaaaaagaatatttttcatgtttatttttacttattgataattaacacattatttttatcagtaaaaataacattaaccggtaaaagtagcggaagtgcagtaataaagcttttcgcgtcattaatatttgccacacctgatacctttattttggctacatcggctgatgagatatgaacgttgatatccagataaggttttaatttagtgatcacgtcaccaagtggttgttcaaagaaatggagttgcccaaaacgccagcttcctacagaatcagcattgactgaggaaatgacaaattgattatcagttgattggctaattgcttgagagccagcatataggtaagtcgcaggggatttttctgtggctttaacttcaacaatgccctcatgtacggcgacactaatttgattattttgataacgactcacttcaaattcagtaccgacaactttaattaatcgctcatcagcatggacataaaatggccgataaggattgggttttactttaaaataagcctcacctttatctaaccaaaggcgtctttgggtttggacatacgagacgcgtacctgtgtatttctatttaaaaaaactttagagccatcagcgagggtcatctctttaggaaaattgctggtggctaaggtcatattatccattaacagggcaggtaaatgactataaggaagatataacacagcaactaaacagagtgcggctgtagtgtgaataaaggggcgccagagtgaagatttccttttttctataggcacaatagtagggcgtggtaaggcttcacaactatgccaaatttccgcgatagcttgataagcttgttgattatctttatctgctacccactgtttaaaggcttgtcgttgctgtgaactcatttgctgactatgttgacgggtgaaccaaagcgcagcttgttcatcaatagattgctggcttaattgatcatgggtatctgccaaaagcgttgcaggcgcctcatctgtgtgaggttgatttcccgacttactcgtcattggtgcatttctcctgtcctgcatcgacatatcttttacaatgtaatagtgctgcggcaatatgtttctctaccatgcttatcgaaatttccatttgttctgcaatttcgctttgtgataatccatcaaagcgataaagaataaaagcttctcgacggcggggaggaagagtatcaatagcttgtgtcagtaaatctaaacgctgttgatgctcaaggacgtgcccgggatcaagctctgtcgtataggtctgtaccgcatcttctaattgataatcttcttgatagatatttttttgtttttggtttttcctccaatgatcgatcaaaacgtggttcgctattttaaataaaaaagcacgctgctcttggacaggagtttgttcttttcgatttagccatagtgtaaacacatcttgagacaaatcatccgcatcatggtgattacccgtgcgtttttggaaaaaacgtacaagctgaccataggttgattggtaggcacaactgattttttgtgctaatgatttatcgctagtcatagtctctggtgtttaaaaaagagtgaaataataagctcttactgcttctaataaggaatttttataatcaatatttagctaattttttattgtattattaataataagcaatatcatttgtgtttgtattatgcctataattcattagaaagaaaatcagaggcaagaattatgagtagtatgtcggcgacttttccacgccgttggtccttttctattggtgggttaactgccagtattgtgtttcatgtcaccttggttgttgttgctataggttggataacgacgaaagatgagcaatatgcggttttacctccagcaatgacgatgcaagtggggctttatcaattggcaaaagcagaacctaaagaggttcctgttgggcctgaacaggtgatgtcagttccagaagctgccgagccagagccgatgaaagagcaacttgatgtgcctaaaatgcctgtagtcgaacagggaacttatgagcgagttgcggaaaagccaaaggtgaaacccgtggttaagcctaagcctgtcgtggtaaaagtacctgatgatcttcccgtttcagaagcgccagcagataccacaaccgcccctttatcaggtgaaaacgcgaccagtagtgccgattttaccagtaccgcttcatcatctcgcagtggccaaatggggtgggaaagtttagtccatagccatattgatatgtataaacgttaccctcgtgcagcattacgttttaaagcgacgggagtgacacaagttgaaatttcgctcaatgcaaaaggtgagttattagatgtgagtatacaaacctcgtctggtaatcgtatccttgataaagaagcgattaacactattaaacgggcatcgccatttccggcacctgaaagccaccgtttagttaacggctctttctcatttattgcgcccttgagctttgactatcggcaaagtagttaatatcgtcattgaatagtgtaagccattgacatcctccacgccctaaaggacgtggatccctactgcgttcagactgatgtctgaatcacctcggcgggttcctgcttcaacgggcggtctgactgcaccctccctccacaggcaagcacggcatgtcctgccgctaaaatgttacgtgccccgttgatatcagcattcgctgtatatccacattcaaggcactcgaattgactttgtgactggcggttttcctttgctgtatgaccacagcaagcgcacttctgactggtgtaggctggtggtattgccactacctgaccacctcgccagagctgcttgtactcaagctgacggcgcatttcataccagccctgctccagtattgcgcggtttaaaccagatttagcttttacgttccgtccatgccgttctgtcgtaccttttgccgatttagacatgttactgacctttaagtcctcaatgacaatcattgcgtggtttttgctgatttcgctggtgactttgtgaaggtagtctttcctgatattggcaatatgagaatgcagacgttgaattttgcgcttttgtttttgccagttggcactgaatttgattttacggcttaatttccgttgaagtcttgccagctttcgctggtttactttaaaactgctgacgggcgggtataccgtaccgtctgaaagcgtggcaagttttgtaacgcctgcatcaagcccgactattgaggttgattcaggttgtggttctgtcgcttcatactcagtctgaatgctgacgtaccatttaccgcatgactgactgaccgtgacgtttctcacttctccgacgacttcacgactgttgcggtagcgcatccatcccaactttggcaatgatatacgactattggattgatcgagcttcacgccctgcgggtagcgaaaagcatcacttttaccgcgtttcttgaatcgaggaaaagcggtacgcttctggaaaaaattcttgtaagcccgttccaaatctttaagtgactgttgtaacggttgtgatggggcttccttcaaccattgtgtctctgtgtcagatttccactcaatgagccatgaagccatttttgtatagggaatgtatttattccctgcttcgtaattctcattctgacgtgctaatgcccgattgaaaacaaaacgacaagcccctgcaaagcgtctcatctcacgctcttgctgaccattgggtcttaactggaatttaaaggcttgtagacgtttcatattatctattatactttggtccatgaaaaatgaaactaatattcgccgtggcagacattgtgtattcctgatgcacgtccatttggtctttgtcacaaaataccggcgaaaaatatttgatcaggatgccattgaaaaattgcgaagctactttgccagtgtttgtgctgattttgatgttgaactggttgaaatggatggggaacgggatcacgttcatttactgattaattacccgccaaaactggcgatatctaatctggttaacagccttaaaggggtatcgagtcgattacttcgacgtgatcgtcctgatattgcccaacgtgattactacaagggggttctttggtcgccgagttatttcgcggggagttgtggtggcgcagcaatatccattatccgccagtacattgagcaacaggaaacaccgagttagttaaaaaaccgcgccttatatccccgacctgaaggacggggttttacggtgctttggataaaacgtaaagagagataataaaaaagcagagggtgagctctgcttttttgcgttcagctaaataatgattacttagtgatgcgtttatatttcatgcgacgaggttggatagcttcgttacctaatgtccgttttttatactcttcatattcagtaaagttaccttcaaagaattcgactttaccttcatcttgataatcgatgatatgagtggcgatacggtctaggaaccaacggtcatgggaaatgaccatagcacaacctgggaattctaatagcgcattttctaaggcgcgtagcgtttcaacatccagatcattggtcggttcatcgagcagcaacatattaccgccgacttggagaagtttcgcaaggtgtaaacgtccacgctcacctccggacagttcgccaacgcgtttaccttggtcaacgcctttaaagttaaagcggcccacataagcgcgacttgggatttcaaagttaccaatgcgcataatatcttgaccaccagaaacttcttcccaaaccgttttgctgtcatccatactatcgcggaactgatcaacagaggccagtttcacggtctcccctaaagtcacggttcctgaatcgggttgttcttgacctgagatcatacggaacagcgttgatttaccggcaccatttggaccgataataccgacgatagcgcctttaggaatggagaaacttaaatcatcaatcagaacgcgatcaccataagatttagtgaggtgactcacttctagcactttatcccctaaacgaggtccaggtggaataaatagctcactggtttcattacgtttttggtaatcaacgctattgagttcttcaaagcgagcaagacgagctttacctttagcctgacgacctttaggattttggcggatccactcaagttctttttgaattgatttatggcgagcggcttcagtggctgcttcttgttcaagacgcgcatctttttgctctaaccaagaggagtagttaccttcccacggaataccttcaccgcggtcaagttctaagatccatcctgcgacattatcaaggaagtaacggtcgtgggtaatcgccacaacagtgccttcataatcatgtaagaagcgttctaaccaagcaacagactcagcatccaagtggttagtcggttcatctaacaacagcatatctggcttttctaacagtaaacgacagatagccacacggcgacgttcaccaccagaaagatgttcaattttggcatcccaatctggtaaacgtagtgcttctgctgcacgctctaattggttatcaagattatgaccatcgtgagattgaataatcgcttctagctgaccttgctcttttgccagttggtcaaaatcagcatcaggatcagcataagctgcatacacttcatcaagacgattgagtgcatttttgacttcgcttaccgcttcttcaacggcttcacgaaccgtttgttgtgggtttaattttggctcttgtggcaagtagccaatttttagacccggttgtggacgtgcttcaccttcgatatcggtatcgataccggccatgatacgcagtaaggttgatttaccggcaccatttagaccaagcacaccaattttcgcgcccggaaagaagctgagtgagatgtttttaaggatatgtcgcttagggggaacaactttcccgacacgcaacatactataaacgtattgagccactataattaccctttgattataaaagagattttatctgaagtgtcagtttttgcgttaaacacaaaagaatgtaaataagcaatgaatatatgacacctaaatgaacaatagtaaagtcaatgtcagtattttgccaaagacccgaaaacgatgaaagtcgccagtatacccgatttataaaagaaaaccttaggtaaaagagaggtttttatcatccttgagtgcttgttcgaaaagtgaggaaaatttcatttaaagagggaactaacattgttaatgattatcatattagctaatgtatttattctttggatgtttaaatttgaggtgggagaggtaacgtggttaagcaaaagtggtccttcgtcttggcaattagtacattgtgtttctctgcgtgggcacaagcagattcattaagtgaacaacgaacacgttaccaagaaattaaagcagcttgggatgctaaagatacagcacaagttgaaaaattattaccgacattacaagattatcctctttacccctatcttgaatatcgccaaattaccgacaatcttgatgtggtcgctccggctgtggtgactgaatttgtcgaaaaatatccaactttgccacccgcgaaagcactaccttctttgtttgttaatgagttagcaaaacgtcaagagtggcaaaacttactgacttttagtcctaatcctcctaagcctaaagcagcaaggtgtaactactattatgctaaatgggcgacaggggataaacaaacggcgtgggttggtgcaaaagaagcgtggttaaacggtacttctatgccttcaagctgtgatccgctatttgatgagtggcaaaaagcaggaaatttaagcattgaattagtgttagagcggattaatttagcaataaaaagtggtaatactgggttagcaacttatttagctaagcgattgccgatggattatcaaacgattaacgatgccattgttgaactacaagatcaccctaatctggttgctcgttatgccacacaactttcaccaacagattttacgcgtaatattgtacaagccgcattttcacgttgggcgcgaaaagatgccgatagtgcaagagcacagcttgatagtattgccagagctcaaaaaatgacgacagctgaacgccaattaatgcgtgatacggtcgcttggcaatatatgccatatgccacaccagagcaggctaaatggcgtgatagtgtgatacaagataccgcttcagataccctgcgtgagcgtcgtgtgcgtttagcgttaagccaaaatcagcccgcagaattagctttatggttagaaagattatcacctgaaagtaaaaataaagaggagtggcgttattggcgagcgatggtgttgcaatcgcaaggtaaaaacagtgaagcacaagcgcttttacaagaactaacacaacatcgcggtttttatcctatggtggcggctgaaaagctaggtaaaccttatgttatggtaatagacaaagcgccaagtgtttcacccacaattccacagcaacctgaagtgcaacgagtacgcgaattaatgtattggcaaatggataatttagcgcgtactgagtgggcaaattatgttgccacccagcctgctaccacacaatctcaactagcgcgttatgcttttgagcaacaatgggctgacttagcagtacaagcaacgattactggtaaaatgtggaaccatttagaagagcgcttcccacttgcatggcaaaatgaatttgaacgatatacgaaagataaagcgatagatcgcaattatgcgatggcgatcgctcgccaagaaagtgcatggaacccacaagctcgctcttcagctggggcaacgggtcttatgcaagtgatgccgaaaaccgcagagttcacggtaaaacaagcaggtattaccgggtatgcaagtagtgcgcaactgacagatccggttaaaaatattgaaattggtaccgcttatcttgattctgtttatcagcgttttaatcaaaaccgtattttatctagtgcagcctataatgcaggtcctgcacgggttgaccgttggttatctgatgctaatagccaactagatgctattgcttttattgagagtattcctttcgcagaaacgcgtggttatgtcaaaaatgtactctcatttgcggtgttttatagctattttgccggagagcaacaaccggtattaactcaaactgagtggaatagtcgttattaatgagataattaagcgatttattaatggaacctctttgtcacaggataaaatatgctatagtttgtactagtttatgagtgtggctagaagaggttcccactatgctagatcctgcattatcaccagaagagaatgaacactgggtacgttttgttgagttattacgccaagcgtttgaacagggagttgaatttcctgttttacaacttttaatgacgccagatgagcgcagtgcattagcaacaagagtgcgtattgttcaagaattaatgcgtggggaattaagtcagcgagagctaaaagagctattaggggttggcatcgccactattaccagaggttctaatagcttaaaaacagcaccccatgatgtgaaattatggcttgaaaaagagcttatgataaaaaaataatcgcctattcgttagaaataaaaatgccatttaatcagttggttaaatggcattttttttaaatagcgacaagagaactatttaatcactcattcatcatcttttttgttaagttgtttataaatatcatgggtgacgggcactaaagctaatacaatcgcttgttggtaaacagaagtgcgacttaataaaccatcagtaaaataaccaatagcgccacctttttgcttaatattatcaatcttggttaaaaatgccatttcatcgccaagttcacgaccttcacgaacaccttttaagatctgttccggtagcattaaactggctgagcgagattcaccgcgaatttgctcgtgttcgataacaatccaagcaaaggtcatatcgtcttcaatacccgcttcaacacctacccaaaagtcagcttctggacgtacttgtcttgcggccatcacacgttggcgtgcgccagttctcgtttctgtatttccaataggttgctgtggaacgcggctatcgacattaatatcttcaatatcaaaggtatctttaccgaacacttgctcaaaggcgagtttgatcgcgttgatttttgctggattcgtagtggctgcaatgacatgatacataatgagttaatcatcctttgaaaaattagagcagtataacggaaaaaatgtatgttacaggtctatcttgttcgccacggtgaaactgagtggaacgtggcgagacgtatacaagggcaatctgatagcccactaacagcaatgggtgtgcgacaggcacaacaagttgctgaaagagtaaaatcagcaggtattacccacataatttctagtgatcttggccggacttgtcagacggcagagattattgcacaagcttgtcgctgtgacgtaatcacggatccccgtttgcgtgaacttgatatgggcgttcttgaacagcgagagatcgccacattaaatacacaagaagaagcttggcgcaagagtttaattgatggtacacctgatggacgaattccccaaggagaatccatggtggaattagctaatcgtatgcaggctgctttaaacagttgcttggcgttaccagagcatagccgtcctttactggtgagtcacggtattgcattaggttgcctgctaagtactgtgttaggcctaccagcttacgctgaacgacgtttaagactacgtaactgttcaatttcacgagtggactatcaaaacagtccttggctcgctaatggatgggtaatcgaaacagcaggggatgtgagtcatcttactgatatcgctcttgatgaagtacagcgttaatgacaataacagactctcttcgctgtaaaagagagtcttattgttaggccgtttcgcgtttaatgggaatataatactcaaaacgcttaatatgatcttgtggctcggcggtcatcacattgtcatagtgcacttctttaagataatacttttcaatatcatgtcctttacggcgagtaagccccatggttggcaagcaaacaccataaattaagaataaaaattcctgcatggcgcctcgttttgcctctccctcgaagtcaaagcgaatataatcgccagcctccaatatgacttcataagcagtatcatcttctacaaaactcgcataagcaggctcaacggcggtggtgtagataacacgctgttcatcttcatgctcatcactgtgttgtgtatggtgcaaaccataaacctcatgagggatagtgtttaccttagtaatataattttgccaaaatgtctgacgcatatcggaacaagcattggcccattgttctagtgtatggctacaagtttgttcaataccaatcaattttatctccggtaattgcacatattcccatttaggcaaaggctgaggatctaattttattggaggacaaatacctacagcacaccactcatcagaacggcgatatagggctggagttctatcaaactgctttttaaaggcgcgagtaaatgtttgttgagaatcaaaacgatattgtaaagcgatatctaagataggacgacttgttaaacgcaatgccacagccgcgcgagatagacgcctcgaacgaatataagaaccaatcgcctgccctgttacttctttaaacatgcgttgtaggtgccacttagagtaacccgctttagttgcgacattatcgagggatagtggctgatccagattattgtcaagccaagcgagtaaatcacgtatgatgttggtttgatccatacatctcccttagtcatattcgtttatttatgctgtagatggtaaatagcctgaacgtctataacaagttatattgttagataaagatgaaatatagtctttttcaatgagtcatgtatacaaattattctaccagttaacaaaagtttgctttatcctagacaaaatcattctttcttctttttatggaataaatttaatatgtttaatttcaaaaagatactcgcactttctatcttgcttcctatgtcaataatggtgaaagctgaagaaattggttatgtcgatacggtttttaagttttttggtgccaatcataaaattgtcattgaagcttttgatgatcctgaagtcaaaaatgtcacttgctatttaagccgtgctaaaacagggggcatttccggtagtttagggcttgctgaagataccgccgatgcggctatttcttgccaacaagtagggccaatcgaattaagcgaaaaagtcttaaaaggtaaaaatcgtggtgatgttgtttttcaaaaaagaacgtcactagtctttaaaaagctacaagtggtgcgtttttacgataaaaaccgccatgcactgatatatcttacttactctgataaggttatcgatggctcaccgaaaaatgccattagtgcagtacccatcatgccatggaaagagtaatttttttaattaattaacaaaattaataagattaagtgtaagaaatttttttagttgataaattagtttctatttaaaatagtcgctaagatcaatttttatcttttatgctttaataaagaaaaaccccgaaactgaaatccggggtttttagcattattttttactagggtaacactgatatcactcgtctaaatcaccacagaaacgataaccttcaccatggatagtagcgataatctcaggtgtatcaggggttgattcaaagtgtttacgaatacgacgaatggtaacgtctacagtacgatcatgaggttttaattcacgacccgtcatttttttcagtaattctgcacgagtttggatttttcctgggttttcgcagaaatgtaacatcgcacgaaactcactacgaggtaatttatactgttcacctgtagggctaataagagagcgactattaatatctagctcccaaccattaaatttatagctttcaactaaacgacgctcttctgtgccattcgctaaattcatagtgcgtgacaataagttacgagcacggatagttaattcacgaggattaaatggtttagtgatgtaatcatcggcaccaatttcaaggcctaagattttatcaacttcattatcacgacctgttaggaacattaatgcaacacttacctgttcacgtaattcacgggctaatagaagaccgtttttaccaggaagattaatatccataataaccagattgatatcatggtcggacagaatattatgcatctcgttgccatcagtggcttcgtgtacgatatacccttcagcttcgaatatgcttttcagggtattacgagtaactacttcatcttcaacaatcagaatgtgcggggtttgcatatttgctacctaaaattaccaaaaatagaaaaaggatatctgtgtgtaacttctgtgtgtgcaaggtgtgtggttattcatttttgttattagcacgccaaaattagacccagatgaaaattcgataaataaccatcacgttattaattacaaacatgacctattttactgacaatggacgttaaaatcagaatgtaaaatgcccatagtctattaacagcaatataacacctgttgtattaaataccatctaaaaagctaacttttgttgacacatatcaaaatcaagataacagcttaaccttgatttcaatagttaactatataatttgatttatgtaatgcaaaagaaaaatatatgttaaatatagtgagattttatctttttaccagttttgttacaaaaaaagaagtgaaataaaataccttattatttgtaaaagtacaaatgtctaagtaactcttaaatggtagcgttattt
